United States Patent Application Publication US 2008/0256663 A1 - sequence listing, part 4

SEQ ID NO: 16254 - DNA, 419 bp, Zea mays
  Clone ID: LIB83-008-Q1-E1-H3
cgcgagtgagtgaacaccagccgtattgtcccgactcctgacccctaccgatcctcgcctgctgcagccatggcgacctccgcggcgctctccaccgccgccaatcccacccagctctaccggtcccgcgcttcgctgggcaagccggtgaaggggcttggcctgagcatgggccgcgagcgcgcccagcggagcattgtgtgccaggcggcgagcagcatctccgccgaccgcgtccccgacatggagaagcggaagctgatgaacctcctcctcctcggggccatctcgttgcccaccgtcggcatggtcgtcccctacggcgccttcttcgtccctgccggctccgggaacgccggcggcgggacctacgcgaaggacaagctgggcaacgacatcacggtggaggcgtgggtcaa

SEQ ID NO: 16255 - DNA, 313 bp, Zea mays
  Clone ID: LIB83-008-Q1-E1-H4
accacgcgtccgtttttttttttttttttcacagattaaacgctgtttacattgggaagtagtacataggtacaggcggcgtacagcatgcaatgcaacatacaacgctgcatgcatgtgtgcacgtgtagttgattgagctcaacgccgcttgacgggatcgaagttatagacaacgacgacggcgccgacgatggcgacgagcacgacgcctccggagacgatgctgaggaggaaattcttgagcgacggcgagatcccgggcgcgggctccgcgacctccgggagcaccagcgccgccgccacggacgcc

SEQ ID NO: 16256 - DNA, 411 bp, Zea mays
  Clone ID: LIB83-008-Q1-E1-H6
ggagtttgatccacaaacctgcacttggtctaccttgcgtacttatggaaggtcacctaattcacgtggtggtcagtcagtgacccttgttggagacactccagtggtctttggcggtgaaggtcatgggagatctcctccgaatgatctgcacaatcttgatcttgagaccatgacttgggatgaatttgagaccacagggactcccccttccccaaggtcagaacatgctgctgcttgctttgcaaaacggtatcctctgatatttggcggggggtctcattccacatgtttcactgacctacaactccttgacactcagacaatgggatggtcaagaccaaagcaacaaggtgttactccagaatcaagagcaggacatgcaggtgtaactattggggaatattggtt

SEQ ID NO: 16257 - DNA, 379 bp, Zea mays
  Clone ID: LIB83-008-Q1-E1-H8
aagaaagccctcgtcctgacccctcgcaaaaccctagctccaaccaccatgaagggcaagggcaacgcctccaagaaagatgaggccaggctccgggccggcggcggcggcgccggaaaacgcaagaaaggcgccgcgagcgggaagcccaaacgccctccctccgccttcttcgtcttcaagtctgaattcatgcaggagtaacaagcgcagcaccctggcaacaagagcgttgcgggcgtgagcaaagcagcacgggaaaaatggcgctctatgtcagagcaagagaagcaaccctatgtggaccaaactgggcagaagaagcaggactattagaagactaaggcaaatattgagaaggagagcacaagctcaaaga

SEQ ID NO: 16258 - DNA, 366 bp, Zea mays
  Clone ID: LIB83-009-Q1-E1-A1
gaagatgcctttggcttagagaggaagcatcatcttcacagaggaaatattttgctcttgctccgccctccccccggtagctgttcccagaatcgacttgttcgcttctctgtaaagttcctgaccttgccctggtagtaagatgtatcatagcacaggtataaggctctctgctggctgccgagcttgtaaatgtagaagattaggtgcttaataaaagatcgaaaggatatgttttttctttcgtttttctttgacagcatttgtaagaaaaaaaaagaggctgacgctcggcccagatcgtggcgctccgacgtcgattattggatttaaccccgccgatccccttggaggtgtttggttgag

SEQ ID NO: 16259 - DNA, 386 bp, Zea mays
  unsure (1)..(386): unsure at all n locations; Clone ID: LIB83-009-Q1-E1-A10
cagaaggtaccaagctagtaggtgacaagcagaggagaagccttacatgtcaataagggcctacctctgatagccaaggatgacttgcctatgtcctttgtttacaaaggacctgaatgtgtggaccattgagaggttcatangcagtctccttggctagcctgagtggcccctattgctcatgctaggcttaatcgagactctttgacttggtgcacgcaattagacacaggagtctcctcgacttgtgcatgggcgtgcatgcaattagacacgaccttgtcatatgtagctgtgtttcagtgtccatgcatgctccattcctagcattttcttgaaaggccaatatagcttggcagtttctctggaaagaatcagcatcaaac

SEQ ID NO: 16260 - DNA, 365 bp, Zea mays
  Clone ID: LIB83-009-Q1-E1-A11
gacatccgggcaatgtgggtcagtgagacgagctgcttgtggcggcagaactcaagccctttgggaagcagctcagggacaaatacgtggagacacagcagcttctcctccagatcgctgggcacaaggatattcttgaaggcgatccattcctgaagcaggggctggtgctgcgcaacccctacatcaccaccctgaacgtgttccaggcctacacgctgaagcggataagggaccccaacttcaaggtgacgccccagccgccgctgtccaaggagttcgccgacgagaacaagcccgccggactggtcaagctgaacccggcgagcgagtacccgcccggcctggaagacacgctcatcctc

SEQ ID NO: 16261 - DNA, 384 bp, Zea mays
  Clone ID: LIB83-009-Q1-E1-A12
cggacgcgtgggtgctcagtgactgcaatgcaaaggatccttctgttttgtatattgaatgagattacatcactgtttttttcttagcgatatgttgagctcatgtgctcgtttatgttagtcgatctctggctcttgtagtaacttggaaagcttgctgctttttttaagggcatacatgcctgtgatgtgtggtcatgatcatttttttctcctgttattttagttgtcgtatcataaatgccatgtttgcattggtgttccaacatgtcaatattattgaataaatgtttgcattggcggcagcggggacgacgctaagtcgagcaatggcgaagcggcccgtggtggcagtaacggtggagagaagcaaggggatgaatc

SEQ ID NO: 16262 - DNA, 383 bp, Zea mays
  Clone ID: LIB83-009-Q1-E1-A2
acaagataaagagtttaataaactggcaactgatgccataattccttctatgcctggacatgtggttcaagcttttacattgctgaaatcaagcacagaggctcagagtgttgtcgcctcccttgcatcagatagaaatgtctgggatgcagtattgaagaatgagaaggttatggaattttataagactcaccagacaactccagttcagacattccctgaggaagcagccacagcagagtcgcctgggaagtttgaagatgccacctctgaaaatgcatccaacagcgaactccccacgggctcaggcgcaagtttcgcagatttcgtggacaatgcgaagaagaaagcgatggatgtggtccacaatataaccgactttt

SEQ ID NO: 16263 - DNA, 388 bp, Zea mays
  Clone ID: LIB83-009-Q1-E1-A3
acgcgtccgaccacacgtccgcccacgcgtccgggcgaggtttacgttttcgaatccgtcacccccgagaaggttcaagctgtgctgctacttttaggacgtggtgaactaccacctggtttagctggcatggttttacccaatcaaaatgaaaacaagggctatgacgatatacttcagaggacagacattccagcaaaaagggttgcttcactaattaggttccgtgagaaaaggaaggaaagaaattttgataagaaaatacgttatgctgttcgcaaagaagtggcactcaggatgcagcgtcggaaggggcaatttgctggaagagccagtctggagggagaatctccagctcctggatgtgatcctggttctcaaggctcaa

SEQ ID NO: 16264 - DNA, 269 bp, Zea mays
  Clone ID: LIB83-009-Q1-E1-A4
caatttctgaagcagtttcagcagcagcaaccgctacaatctcctcgtgttttagcatctggttcacagaaatctgcgaatcttacaggctcgcagccgggtacaccattgtcaggtggaactatgaatggtgggaattgaagtcaaggaacctaagggactaaccaacttcttgggaaaagggaaattcaagatttgggtgcacaagtaaattccttaagcaaaggttacccaaaagttgaagatttacctccaaaaatccctgaaga

SEQ ID NO: 16265 - DNA, 390 bp, Zea mays
  Clone ID: LIB83-009-Q1-E1-A5
actagttctagatcgcgagcggccgctcgccggccatatagtccacacagcaggcagagagttcgagagctagctagagagagagagagagggacaacgactaaggcaagctagctcaccgatatcgaacgaatggaccgtgtgatgcagctggcgtcggagcgtgcggtggttgtgttcacgctgagcagctgctgcatgtgccacacggtgacgcagctgatggcggacctgagcgtgaacgcgctggtgcacgagctggacagcgaccccaggggcaaggacatggagcgcgcgctgctcaagatgctgggagggagggcgcccgctgtccccgccgtcttcatcggcggcaagctcgtcggcggcaccaacaatgtcatgtcgctc

SEQ ID NO: 16266 - DNA, 361 bp, Zea mays
  Clone ID: LIB83-009-Q1-E1-A6
cgccggcgaagcacctgctgggcttcgagaaggtgtcgctggagcccgggcaggcgggcgtggtggcgttcaaggtggacgtgtgcaaggacctcagcgtcgtggacgagctgggcaacaggaaggtggcgctcggcagccacacgctgcacgtcggggacctcaagcacacgctcaacttgggagtctgatggccgagaggggaatggctaccaagtaccaacgtgaaggcagttggaatttggagggctggatgggtcggaggcagtcggaagagaaagttgtcagaaattggtcggcaagtgtctaataaaggcttcctgttgggaaagaattggatccacgggcagctttttagtca

SEQ ID NO: 16267 - DNA, 376 bp, Zea mays
  Clone ID: LIB83-009-Q1-E1-A7
acggacgcgtgggcggacgcgtgggcgcgccaaaccccaccgctgcgcagggatcgctctggaaccgcgcgagcgacctcgtggacgggctgttcgttgccccgagggaccctaggcagctgaataagctggccaggaagaacgtcaaggacactgccggcaagggctggttcgacatgccagctccgaccatcactcccgagttgaagaaggatctcgagattttgcagctgaggcatgtaattgacccaaaaaggcacttcaagcgggcaggaaaatccaaggcccttcccaagtacttccaagtcggtacggtcgttgagcctgcatctgagttctactcaagtacgctgagaaatagggaacgcaaggcaac

SEQ ID NO: 16268 - DNA, 201 bp, Zea mays
  Clone ID: LIB83-009-Q1-E1-A8
gacgcacgcctctgaaatgactcgtatgaaacaccgccgccgccgcgccttccattccagtactcgcggatgaacggaacaccagccagcgccatgggcacgatcgacgacctccgcctccgtgctgtccgcaccgtctgtggccgggcctctcctgtcgccttctcgccaggcgcgtctggtcttccgcgcggctcggtc

SEQ ID NO: 16269 - DNA, 361 bp, Zea mays
  Clone ID: LIB83-009-Q1-E1-A9
cgcagatggagtttagcttatttgcccctcctttgtatctgacaacaagcagtaagcaaaggctctttgaacacttctggaacagtggtggtgccagaattggggaagatggagctcttggatggtctgaatggttagcaaaagacgaggagagtagacaaaagttgtctatgcaagaaaattcacaagagactgaaacaggaggctggagtggttggtttgatccttctctgggtaatactgagacaaatgatttatcaaacaaatcactggaaccatcattgaccgatggaaatgatgctgaagaccttgatgctgaggactcaccagcacaagatgatgttgaatccttgctgaaaaa

SEQ ID NO: 16270 - DNA, 370 bp, Zea mays
  unsure (1)..(370): unsure at all n locations; Clone ID: LIB83-009-Q1-E1-B1
ctcaataccttaagcaaggaccaatgtctcaagcccagccccctcgttcccaagcccagtggaaacacgttaaatttcaggataaccaagctaatgccatgaaggaaccaggaaccggtgggtatggctatgggacgaaaaatgacaagaataaggatgtggatacaatagcttcggacttcatcaagctgaagcacaaggcttgggcactccagaagagcacaaccatgtaccaaccttctacctaaaggtgtcaatagttcaagaagttgatactatatacttatgcttgtctctgtatagtctataagtcctaattcaaataacaggtgctgcttgcagccttggatatttgcggatgcngagtgaa

SEQ ID NO: 16271 - DNA, 312 bp, Zea mays
  Clone ID: LIB83-009-Q1-E1-B12
cgcggatcgacgcacgcctctaaacatgcgtcatgagtggtcctcctccgctgccaatcgttggaccttgcccctgctgcgacgtcggcggctccccacaccctctcctccctggctcctgagcttcaaccttggggcttgtgccctctctgctcgccggggacctgcgtcttctccagccaagccatagccaagctcctctccatagccgacgcccttgccctcctgctcgccatggctggccatcggatgccgcacagcaacctcgccgtttccgagcccgagcccgccatggagctcacggcgcctcct

SEQ ID NO: 16272 - DNA, 392 bp, Zea mays
  Clone ID: LIB83-009-Q1-E1-B2
gcgtgaggtaaacatgctaagagaaagaaacaaatcctatggagcaataaagtttgttgacataagctcgaaagattactctccagatgacaatcaggggcttgattatgaaacttccatggggaggatacatgcggttctttcagatggaactgttgtcacagacgttgaggcatttagaaaactgtacgaggaagtaggacttggatgggtttatgctgttactaagtatgagcctgtagctagcatggcaaatgcagtatatggtttgtgggcaaaataccgtatgcaaattacaggtcgacctccgctagaagagatcatggcatcccgaagagctgcaggcgaatgtaaagatgacaaagtatgcaagatgtgagcataaagatgtt

SEQ ID NO: 16273 - DNA, 144 bp, Zea mays
  Clone ID: LIB83-009-Q1-E1-B3
taacattttgccacttaaattgatggggaagacactcagatgtgtaagttaagaatgcacagttcctacgtgtaaaaagcttagttccagtacttgaactctcatcagttgggacaaaatcgcaataaaacctcgaattgctct

SEQ ID NO: 16274 - DNA, 384 bp, Zea mays
  Clone ID: LIB83-009-Q1-E1-C1
actacgagtatgcccatacgtccatgtgacgtatgctacgatatgatactttgaataccatattctgacaagtatctccaacgagcatgctagtgcagatcaccttgtctagtcacgctatgcatttatcaatggtcacttgcatcatatttcgctcagaagttttagactttccagtggtcaaatgctacgtattcaatcgatgccatgttactctctaactatgcacactctctctcatgcaaatgtctactgccttagtgagtgtaattaattatcacatctgtcagggagagctacaatcgtcaacaacatgctctaattaatgtcataatgactctttcatcgtgtctcaaataacctggatttttccttttgccttgt

SEQ ID NO: 16275 - DNA, 394 bp, Zea mays
  Clone ID: LIB83-009-Q1-E1-C11
ctcgtggatcgacacaagactctaaagtcagtcgtagtagtgccgcacacatcggagcaatgttcaccgcgttcctgtcggtggcgagtgccctgggcaccccgtcgcttttcgctgccatggttctttcattcctctcgaacctcatgggcgggaccacccactacggcatcggctctgctcccgtcttctacggcgccgggtatgtcccattggctcagtggtggggctatgggtttgtcatctccgttgtaaacatcatcatctggctcggggtgggcggcttctggtggaagataatcgggctgtggtgagcagagagcagcacattaactgcgacatcccttttgtttttctgttgtttttttgtcgagtggggggaggaaaactattt

SEQ ID NO: 16276 - DNA, 380 bp, Zea mays
  unsure (1)..(380): unsure at all n locations; Clone ID: LIB83-009-Q1-E1-C12
aaaatatgatgctcatgttgttggtattgatctttccataaacatggtatcatttgcacttgagcgtgccattgggcgcagttgctcagtggagtttgaagttgctgattgcactacgaagacatacccagacaacacatttgatgtcatatacagccgtgatactatccttcacatacatgacaaaccctctttgttcaaaagttttttcaagtggctgaagcctgngggcaaggtccttatcagtgacaactgcaagggtcccgggaaaacatcaaaagaatttgcagcgtacattaagcagagaggttatgacctacatgctgtggaggcttatggacagatgttgaagagtgctggttttcgtgatgtcattgctg

SEQ ID NO: 16277 - DNA, 218 bp, Zea mays
  unsure (1)..(218): unsure at all n locations; Clone ID: LIB83-009-Q1-E1-C2
cccactcggggaggtggcgctctcggagatcgagaggctcctgatgcaggagggggaggcggagctgggcggggaggtcgatgggatcagcgtggaccagttcttcgacgcgctgtacgacggcggggaggcgaaagatgagcgggaggcggnggcaagcgcggatgcggactccggtanggacgaggcgctggaagtcgtgacgcccagaggcggga

SEQ ID NO: 16278 - DNA, 351 bp, Zea mays
  Clone ID: LIB83-009-Q1-E1-C4
cgcgtccgcccacgcgtccgcccacgcgtccgcatcagcaccgagcgaacagggaacaacgagaggccgacaagcgctttagcgataagactggtgcacccgtagcggcacggcatggcggccacagcgtactccgtggcgctcctcggctgcgcacgcctgccggccgccctcctccctcggcgcagcatcgtgtgccaccagcagcttcgcctccaagacgcgccgaggctctccctgcaccgtgccagggccgcttccgacgacacgtcgggctccggcggccaccagctcatcgaagacctcaaggcaaactggggacccgttgaggaaaagccccacgtcctcctg

SEQ ID NO: 16279 - DNA, 362 bp, Zea mays
  Clone ID: LIB83-009-Q1-E1-C6
acgcgcacccggttccgcgtgcctttccccacctactctcgcggctctcgccagccagtctagggtttcggtcccggcgtgcttatccgcccccgccggccatgtcgaagcaaggagggaaggccaagccgctgaaggcgcccaaggccgacaagaacgagtacgacgagacggatcttgcatatctgcagaagaagaaagatgaggaaaaagcactgaaggagcttaaggccaaggcacagaatggcgcgattgggggctcgggtctgaagaaaagtggaaagaaatgagactggtcacccgtctccaatacctagaggatgataaggcagctgtctatctgtgttgcgcttcactaagtg

SEQ ID NO: 16280 - DNA, 389 bp, Zea mays
  Clone ID: LIB83-009-Q1-E1-C7
gcgctctgctctaagtggacttcttaaggatgatgggattctggtgattccaactgctttggggtgccccccgaagcttaacgctaaggaactctcgtctgaaagctacaattctcagacactacgccttttgtctttagctagcatgtcagggtgttgccaggtttccattcctttgggtacacatgataagtgccccatttcagtttcgttgattgctaggcatggtggtgatcggtttttgttggacaccacacaaaccatgtatacaaccatccaagagcaagtggagatactagcgaaatctagtgtttcaagtaaacaggcgatgaatgaagaagcagctgaagctgctaaagagaaaggtaatgctgcatttaaggaaaaac

SEQ ID NO: 16281 - DNA, 263 bp, Zea mays
  Clone ID: LIB83-009-Q1-E1-C8
cgaactcgccgttgccattcgcctagggtgaagtccatgtcatctccctgccctggtgcacaccgtcgcgcttctgtgatctgggccaacacacctagccaatggagcccgtccgcatgtcactgttccgcttcccacgccgaggtgggttatcctggaagtttagatgaaggaagtgaagatcaacacgacattactagatgtttgatgaattgtgtggatcggatccgtcattagtttggtacgctaatgatcaaaatgcg

SEQ ID NO: 16282 - DNA, 278 bp, Zea mays
  Clone ID: LIB83-009-Q1-E1-D10
ctcgtcgagcattccgaggtcctacagtcagtcgtattacagctgcagcaagaaagaataagcgagcgcctccctaacgctcgttgtcagcaagggccaacagcgccgcgtccagccgcctcaagtcgtccttctcgggctcgcggctcccttcgggcacgcggagcaccaccccgtcgtccgtggccgtcgccaccccggacgccggcggctgcccgatccgcgcgtccatctcctcctcacccaacccggcctacaacctgacgtccttccggttc

SEQ ID NO: 16283 - DNA, 309 bp, Zea mays
  Clone ID: LIB83-009-Q1-E1-D12
acggacgcgtgggcaggcattcgcgtaaacgatgcggataagctcgtgacgatcggaggccatgtgctgcgccaacgtgagtggctgtcgctgaatgggtcgactggtgaagtgatccttggaaagcagccgctttccccaccagcccttagtggcgatctgggaactttcatggcctgcgtggatgatgttagaaagctcaaggtcctggctaacgccgatacccctgatgatgcaattaatgcgccaaacaatggggcacaaggaatttgattaagccggacagaacacatgttctttgcttcagac

SEQ ID NO: 16284 - DNA, 403 bp, Zea mays
  Clone ID: LIB83-009-Q1-E1-D2
gatgcacgaatcgctagggtttcactttactcgtggacgttgctattccattctctactttattattttgtcacaacattagcatttttgcattcttacccacagtgaaatatatgtaatcttttccttcccatttagaacatgcacacggtaaggaagcaatgctatgcttgtttttgcagaaccccgaccacatccgtgctgttttggcatgctgctgcttctgtagcttctgcatcactagatgtctctgaagaacatgagaatgtctccagaccagcagcctttccagcttcaaatctcgctctcctctcaacagcctctcgcaccctctgcgcaaactcttcatcagaaccagtcagcatgtaacgcagcttcatgttgatcctgttcgccaacaaag

SEQ ID NO: 16285 - DNA, 372 bp, Zea mays
  Clone ID: LIB83-009-Q1-E1-D3
acccacaccaaacctcagctcccaccgatcggttccatcaacctaacaatccctcgcttgttagcccgcgcgcgtgtgtcgtgtgcgctgcgtgcgtcccatggctcagcctcgcgtgcacccaaacgcggcggcggcggcgggtgacctggagatgggcggcaacggcggcgtgttcccgccgctgccagttcgcgggcagcccgcctccgtgaaccagcagcagctcggcggcggcccccacacctgggtgggcaacgacgccaacacgctgctggtggtggccacgctgatcaccacgctcacctaccagctcggcaccagcatccccggcggctactggcagcatgacacgacggcggcgtcgaggga

SEQ ID NO: 16286 - DNA, 393 bp, Zea mays
  unsure (1)..(393): unsure at all n locations; Clone ID: LIB83-009-Q1-E1-D4
ccaagaggtcttacatggatgctgttattaaaggtctgaaagcagttgaagatgttgatgtcgaattatttggttctaatttcagaacgaatgaaacactaagttctaagcttttggatggtgacacaaagaaaaagaagatatatgttaggctccttcttagtattgatcgccgcgagacaacttcggctgcattggataccgttaatctagccatggaaatgatggaccaaggtgtcataggcattgacctttctggcaatccagttgtgggggaatgggaaacatacctgcctgccctacaacatgctaaaaatctgggaatccccgttacaatccactgtgganaaggtgcgaaacggaaggaaatccaagcagtgctggacttttgcc

SEQ ID NO: 16287 - DNA, 300 bp, Zea mays
  Clone ID: LIB83-009-Q1-E1-D6
ctctagactctgtcctgttactgctactgcgcgcgtgctcgtcggtgttctcagctcgcccgaccggagtttttcctgcgcgcaccgttttcccagctcggatttcgcgagccaccgttgtcctatccgcgtcagcacgtgaccgtgggcgtgttcaaccagtttggcaacgccttggtaacgaatccaatggcctccctggtgccttgctccgtgggtgctcaagtttggcctccaactggtgaaaacggtcccccctggtcctgatctccttaaccgtagaaccctccccggaatcct

SEQ ID NO: 16288 - DNA, 396 bp, Zea mays
  Clone ID: LIB83-009-Q1-E1-D7
cggacgcgtggggttcgaatccgtatagccctaatatatacgtcttttttccattttaggatggatatcttatgtttcctttagtatagttttcttttccttatttagtacttgtttatagactcgacggtcgattgcgccatagaatagagataaaagcattaccataggctcattcatcgaaacgcaaatcagagagacaggaaaagaaaaaagaattttgatcaaatcaatagaaggaaggatcccttacctgatttgaatttcatcctcctttaaataggatatgctctaagtcttcccatactttcctataatgactgcaacgattttctccattttgcgaattcctattttatttgaagtatattactatcatatacattatctaaatcg

SEQ ID NO: 16289 - DNA, 412 bp, Zea mays
  Clone ID: LIB83-009-Q1-E1-E1
gggtcgacgcaagactctacaatgagacttaggaccttggattcgtggtcctgctctgcggtttgcttggtatccctccatctaatggagtgcttcctcagtctcccatgcacacaaaaagtcttgctgtccttaagaggcagttgctaagcaaaaagatggttgatactgccaaggagagcataggaggaagtgctaccagtttggaaatatatggcaagatggaagaagttttcatcaaaatggatagcgaacagaatactgattctgttgacagggagttgaagaacttcaaggatgctgttctgcaagaaggcgacgaagaagggagattggctagagaatttgaccctcgcaaacatatagaagcccacttgcctgtccgagtgaacgaacagagactgagcaatct

SEQ ID NO: 16290 - DNA, 369 bp, Zea mays
  Clone ID: LIB83-009-Q1-E1-E10
ctcgtgtagcaatccagggccgatacacgcgtccacacaagcgtctgagactttgtcaaacttcctatgtgaaaaagttgctagaaaaggtcggactgagccagtgcaacccatgttcaactccaatggaagctaagctgaaactgtccaaggacagtgattcttctcgagttgattcatctgaatatacaagtttgattgggagtctgaggtatttgttgcacactaggcctgaactgaatttcagtgtcagttatctgagccgttttatggaggcaccaagtcaggatgaccttgcagcagttaaacatttacttcgatatgtagctgggacaatggagcttgggctgttttatcccagaagaacac

SEQ ID NO: 16291 - DNA, 382 bp, Zea mays
  Clone ID: LIB83-009-Q1-E1-E11
ctcgtggatcgacacaagcctctatactgacgtcgtattacacaccaccgcgaaaccccagcagccgcatcgatggcgcctaaggcggagaagaagccggctgcgaagaagccagcggaggaggagcccgctgccgcgaaggccccggcggggaagaagcccaaggccgagaagcgcctcccggcggccaagtcgtccggcaaagaaggcggcgacaagaagggtaagaagaaggcgaagaagtcggtggagacctacaagatctacatcttcaaggtgctgaagcaggtccacccggacatcggcatctcttccaaggccatgtccatcatgaactccttcatcaacgacatcttcgagaagctcgccggcgaagctgcca

SEQ ID NO: 16292 - DNA, 293 bp, Zea mays
  Clone ID: LIB83-009-Q1-E1-E12
actcgtctagcactcgcgggtcgacacacgcctccatactaactcgtaccaacgcatcagcacgtcagggagtcataaatggagcatcctttgggtctgaactttggtaaacatcatctccctatccggagaaacatgtttgtgtggtcacaggacttccagccaaataccgtgatcccaatacaaggctgccttattcaactacggaagcatttaacataatccgggagagtttcctgaaagaggaggctgatagaaaccgtccgaaacatgtccactactggagagctttt

SEQ ID NO: 16293 - DNA, 382 bp, Zea mays
  Clone ID: LIB83-009-Q1-E1-E2
acctggagggactccaccaggggaaagatctaggttctggaggagctcactgctatcttgatctttcccctggagggaccccgccagggaggaaagatctagggttgtcttgagatcggcatgccatccaagacgcatcgagacgacgcagagtcaaagcgaggtgaagattgagtttgggaaaccacaactagggctacactacacctactactaaagcatgaatgataaagaaggtaaacggattggttcgatcggaatgtgtacatgggtactcaatcggctgtacccctttatattatatggggaggtctagactcgttactaggcgagatccaactgatttccatggatatgttaggataatcatgtgtgggataaa

SEQ ID NO: 16294 - DNA, 89 bp, Zea mays
  Clone ID: LIB83-009-Q1-E1-E9
ctcgcggatcgacacaagcctctagaatgacttataatatgctccatggttcaaaactctgttcttcaatacatcatcaattatcgatt

SEQ ID NO: 16295 - DNA, 162 bp, Zea mays
  Clone ID: LIB83-009-Q1-E1-F10
ctggtctagcactcgcggggccgacacacgcgctccaccctcttagtcattcgtctcgcgtcgatcctatgcttcccgttctcaagaagcgcagctgcccatgcggcactgtccacgcgaagcctccgaccgccacgcgccgagctggctggccgccggcct

SEQ ID NO: 16296 - DNA, 118 bp, Zea mays
  Clone ID: LIB83-009-Q1-E1-F12
actcgtctagcactcccgggtcgaaacactcattcgatagaggtccctttcatcggatagtattcgaatcaagtagattcaattctggacatcgtctttcccagaacagggactacat

SEQ ID NO: 16297 - DNA, 385 bp, Zea mays
  Clone ID: LIB83-009-Q1-E1-F2
ggccggcgcgcagatcttctcggagggcgggctggactacctggggaaccccaacctggtgcacgcacagagcatcctggccatctgggcgtgccaggtggtgctcatgggcttcgtcgagggctaccgcgtcggcggcggcccgctcggggaagggctcgacaaggtgtaccccggcggcgccttcgacccgctgggcctcgccgacgacccggacaccgccgccgagctcaaggtgaaggagctcaagaacggccgccttgccatgttctccatgttcggcttcttcgtgcaggccatcgtcaccggcaagggccccatcgagaacctcttcgaccacgtcgccgaccccgtcgccaacaacgcctgggcatacgccacgaac

SEQ ID NO: 16298 - DNA, 120 bp, Zea mays
  Clone ID: LIB83-009-Q1-E1-F3
cccacgcgtccggaacggcgtcgacgagggcttcccgtacgcacggccgccggtttgtgagctagccggcgacatccgtgtcagtcctaaggagaaaaccatgttcttcgttaacccgtc

SEQ ID NO: 16299 - DNA, 262 bp, Zea mays
  Clone ID: LIB83-009-Q1-E1-F4
acggacgcgtgggcggacgcgtgggcggacgcgtgggcggacgcgtgggatggaatcatgtggtcttttgcatctggagtcaatgtgaacaagcagattgtcgtattgtctttctcgtaataaatttgtcgatgttgagcccttaggctgttgttggtacattggtacttcgtcgatgcttgaattgggacccttagtccgttttcctagactctgatgctgtatgcaactgaaacaagtaaatctatgatcttaaggctgc

SEQ ID NO: 16300 - DNA, 63 bp, Zea mays
  Clone ID: LIB83-009-Q1-E1-F8
cgacacacgcctctagccatgtgtctgatgacatgcacgcggagtagaagggacgcagaaatc

SEQ ID NO: 16301 - DNA, 371 bp, Zea mays
  Clone ID: LIB83-009-Q1-E1-G1
gggtcgacgcaagcctctacacagacgcgtgctaacgcgtccgcccacgcgtccgcctaaaagggtcctgcccaaattgtggcgagcaggtatttgcatttgtcaagattgaaaaaaccgtgagagcacctcatcgagcagaatgccatgtctgtcagtgccctttggagtaccgcacgaaaattgagaaatcttcgtcagggcctagaagaagttgggtctacggccgggtttatctagtgaagcaagggcatcctgaaacggaaatggataaatgaaaaattctaattgattgagactgctgagggaagtttagataatcccatgagatggcactcttctggtcgactgaaacatttttcagatgccac

SEQ ID NO: 16302 - DNA, 364 bp, Zea mays
  Clone ID: LIB83-009-Q1-E1-G11
gaccaccatcacctcaagtatagcgtcatcaagggaaagctatgggattcgagcaagtccatgaaactgggggtcaccaccacaattgaagctggggttcctgtggtcttacccgcaaccattgaggtccagagcgagttcaactccacctacagctggggcgagtccatcatcgagaaagaagagtactccaacgcctacgaggtcgttgtgcctgcatactccgtcgtcacggtcagcgtactcgccacacagggcatctgccaagtccccttctcttatactcaggaggacgttttgactactggagagaggaaggttttcaagtttgatgacggcatcttccgtggtgtcaatagctttg

SEQ ID NO: 16303 - DNA, 367 bp, Zea mays
  Clone ID: LIB83-009-Q1-E1-G12
atgtgtcctagcgccgccgccgccccaactcgccttgcgtgactgaaagctcgtcggcttccgtccacgcgagaagcgagagcatggacacccaggtgaagcttgctgttgtggtgaaggtgatgggcacgaccggctccaggggtcaggtgacccaggtcagagttaagttcttggatgaccagaaccgggtcatcatgaggaatgtcaaggggcccgtccgcgagggtgacatcctcaccctgctcgagtccgagagggacgccaggaggctgcgctgaagccctagcgttcttggtgggctcttgtttggtctttggtgtcttcgaatttgtgctatgtttgaacttctgtgaccctgtcttga

SEQ ID NO: 16304 - DNA, 387 bp, Zea mays
  Clone ID: LIB83-009-Q1-E1-G3
attgttttgaaccacccactccagaggataacagagaagcagaacagggtctcgataaccgacaggatgtgggcaaggcttctgtcgtcgaccaaccagccgagcttcctctgcaacaaagtcatcgaagaggcaaagaaggagcaggaaagagcggcgcagcttttagatggctcgccttcccatcggaaggttgacgacgaggttgcagcttccaacttgggtcgtaccaagtgaggtgaacctttttttcctgtccaaagtttcagtagctatggcgaccggtgttgctgctgctcagtggtctgtgctccctgtccatttttttttctaaaaaaagaacacgttatccctttctagtttaaacagagtgttgaataatatcgt

SEQ ID NO: 16305 - DNA, 331 bp, Zea mays
  unsure (1)..(331): unsure at all n locations; Clone ID: LIB83-009-Q1-E1-G4
aactgagcgtagccattcgtctggcaaagctgttgttggctggctcaagatcaaggcggcgatgaggtggggaatcttcgtcaggaagaaagctgccgagagaagggcgcagctggtcgagctggaggattgacaccgtggctttacaatggtcaaggttgccttgtagattactagtagttatctgcccccataccttcctgttaccgttgaaacaagtttctgaaactcttttctganatgtacaacgagtagttctactatttccttgtacagaattcaccttgttttgattgtgttagttgtggaacattgctctgctaagtttgac

SEQ ID NO: 16306 - DNA, 315 bp, Zea mays
  unsure (1)..(315): unsure at all n locations; Clone ID: LIB83-009-Q1-E1-G5
cgctgctcacaccactgcccattccccttctctcgccgtattgccaacgcgtctcgtctccgtcgcttctggcggccggggcagttatcagacctctcatttgtctttccccccacaatcaccgccaccacgatgcactctacccctctgtccccaatgtgtggccacgccaccggcgccgccgcaggggcgcagttgcttccgtcgaccaggaggagtctagtgcctcggaaaccgcagtcgctcccgaggaagacctgnggccaccggtatcctctgatgcggctgccgaggacggggtcgcgacttctgccc

SEQ ID NO: 16307 - DNA, 390 bp, Zea mays
  Clone ID: LIB83-009-Q1-E1-G6
atcagagcagaacaagttccaatattataaccgcaatctctcaagacaacagtcacagcagcaggcatggcttcaaaagagaaggcaggagaacatggcgaggaaagcagctggtgaggagccactaccagaagaagatccatccaatcctatatttaagcctattcctgagccctcacgattggagggctatctagtaactaatcagatctgcagttactgcaaccatatcaacggggttgctggtcagaatttcgacaggctatacctgatgaaggccttgcatgaggattagaagactgggctgtgatgaatgctgttagaattagcttgtgatactgctcaaaatcgtaattttgtgatgtacctttacatgggcgtgcctgtcct

SEQ ID NO: 16308 - DNA, 334 bp, Zea mays
  Clone ID: LIB83-009-Q1-E1-G7
atagttctcaacgacgtctgacggcagtgctcctgctcctcctcctccttcccggccgccgcgcgagcttgggttagtgtctcttctaagcggagacctgtgagaggagccatcatcatggccgctgttgagactgttgtcctcaacgttgctatgtcatgcgagggttgcgccggggcggtcagaagagtgctctccaagatggaaggagttgaaaccttcgacatagacctcaaggagcagaaggtgacagtcaaaggcaatgtcaagcctgaggacgtcttccagacggtttccaagtcggggaagaggacctcctactgggagggcgaag

SEQ ID NO: 16309 - DNA, 388 bp, Zea mays
  Clone ID: LIB83-009-Q1-E1-G8
cggacgcgtgggctcgccgtcgcttgtggcagaggagcagcttcacggttccaaagacaccttgaccttgaagggcgagaaggctttgctcgagttgcttctaggcatggctctggaccagcacgttgacggcaggaagctcattacccaacaggaggctgaggatagtgatttcgagagctatttgagagaagcaacaagccgagtgctttaccagccaacattcattgaagaggatgatgatgatgattctgtttcggagagctcttcagcatcattggccaaaccagctggaactttggatcttggcaagctgacagaggaaccacagcctcaccgcagtgtggatccaaaccattcgtatgatcaagtgtttattagatccact

SEQ ID NO: 16310 - DNA, 404 bp, Zea mays
  Clone ID: LIB83-009-Q1-E1-H1
ggtcgccaagcacaactccaaggaggattgctggctcatcatcggcggcaaggtgtatgatgtgacgaagtttttggtagaccacccaggaggtgatgatgttctgttgtcctcaactggcaaggatgcgactgatgatttcgaggatgtcggtcacagcaacactgcccgcgcgatgatggatgagtacttggtgggtgaaatcgacgcgtcgacgatcccttccaggacgaagtatgtccccccgaaacaaccgcactacaaccaggacaagactcccgagtttgtcatcaagatcctccagtttttggttcccctggcaatcctgggcttggctgttgccgttaggatgtacaccaagtcggagtctgcttagctttgttgcccacttgcccttgcccccc

SEQ ID NO: 16311 - DNA, 376 bp, Zea mays
  Clone ID: LIB83-009-Q1-E1-H11
aacagaatgtatggttgtttgtagttgtaagaagtttgaattcatgggtcttctttgttgccatgtattgaaaattcttgatctcagaaatattaaagaacttccacgacactatatcctgaaaagatggagaaaagacgctcaaagtgaatctccagagaactatggttttgctgccatagatgaagatcctaagttttcattgtcaaaacggtacaacgcattataccggaatttgtataaaattgcagcaaaagcttcagaaagcgttgaagcttatgcattcctggagaaccaatatgaacagcttgttgaacaagtggaagtacttctgcaagcaaagttgcatgataaatcttccttaagtaccatcctg

SEQ ID NO: 16312 - DNA, 245 bp, Zea mays
  Clone ID: LIB83-009-Q1-E1-H2
cccacgcgtccgcgagctcgcagaagaggtcgcaggcatcatcggcatgctgatgactagtttcctattgtgaatgttgggtagaagtgctgtggaataccctagacattaccattttatttgggcctcatgccccacagttaatctgctgtgcctggtcaaaatttctaggctggacaagagctgcttttgtaagctgggcaatcctgtatcgtgatgtatcccatggcccctgcattcttcac

SEQ ID NO: 16313 - DNA, 270 bp, Zea mays
  Clone ID: LIB83-009-Q1-E1-H3
atggcttggctgttgcgctcaaacaggcaactactccagaatacagagcttaccaagagcaagttatcagtaattgtgctaaatttgcgcaaaaccctgattcaaaaaggaaataaatcctccccgggtggaacggacaacaattaattccggggaatcccaagaataaagggaaaaatgggtcaaaggttgagaaaggtttaaaaagtgtgcaaaatgcaacaaacaagaacacaattcctggtgaagtttcaaccaaggtgccaagaa

SEQ ID NO: 16314 - DNA, 383 bp, Zea mays
  Clone ID: LIB83-009-Q1-E1-H4
ctcaacctgagaagctagctagagctagctagctccgggcgcccgcagcctggccacgaacagccaccgcattattgcgcccggcctcctgctggtcgcggccacgacgctagtcgtcgtcgtcgtcgcgcagctcgcggcgccggctgccgcctgcccctactgcccgacgccgacgccgccccctccgccaccgcccccgcccccggtggtgaacccgccgccgtcgtccacgccgtgccctccgcctccctactcgccgtccacgccgacgggcaagtgccccgtggacacgctgaagctgctggcgtgcgtggacgcgctcaacggcctcgtgcacgccgtcgtcgggaccaacgccagcgacacctgctggccgctgc

SEQ ID NO: 16315 - DNA, 331 bp, Zea mays
  Clone ID: LIB83-009-Q1-E1-H5
ggggcgagaaaagggaagcaagctgggagagaagaatcacaccgggccgtgccgatgggtgtttacgagtagcagttgtatctcgttgacctcaccgcctgcagggcaccaaggaggagatgacttccccgaagcgggcagcagggcgggaagggtgcggatgcttggccgccgtcgcgcggggcctccgcggggcgtgcttccggccggcggtgacagcggacggtgacggcggcggctcggccaagggcagccacgttcacgacgcatagacaagatatctgaatgctaacaatcgggagcttggtgatcattttcagacaaaacgcga

SEQ ID NO: 16316 - DNA, 395 bp, Zea mays
  Clone ID: LIB83-009-Q1-E1-H6
cggacgcgtgggcggacgcgtgggatggcagccaccgtttgttggtggaaacagagacaagattcagcagaagatagtaaaggagaagataaagctgccaacatatttatctagtgaagttcactcaatgttgaaaggattattgcacaaagaagctggcagaaggctgggaagcggaccaggcggcagtgacgaaatcaagaaccacaagtggttcaagtctgtaaactggaagaggctggaggcccggcagatcgagccaagcttccggccgaatgttgctggcaagacctgcattgcgaactttgacgagtgctggacgaacatgcccgtgcttgattctccggtggccagccctgttgcggccaacagcaactttgtggggttcagttatg

SEQ ID NO: 16317 - DNA, 311 bp, Zea mays
  Clone ID: LIB83-009-Q1-E1-H7
ccgcccttttttttttttcttgtgtccaacgtaagtgtcagtgcatcccatgatggcatacatacatattttgcgtacatacacatcacatgactggataaatacatatgtccaacgtattagtcagtgcaccccatgatggcacacatacatattttgcatacagtagacacatcacatgactggcaaatcaggcatagatctctcatctcattctcagtcagtatcaggaactatgaagtaggcctcgtcgactgagtcaggcacctcgatgcgtgacttcgtgaacaggcgcgctccgattctcgtgg

SEQ ID NO: 16318 - DNA, 355 bp, Zea mays
  Clone ID: LIB83-009-Q1-E1-H8
acggacactcgggggcgagggtgaagacgtcggcgcaggacatcatcaacctcaagccactcatcgacaagaaggcgtggccgtacgtccagaacgacctccgcctccgggcctcctacctgcgctacgacctcaagaccgtcatcgcttccaagcccaaggaggagaagcagagcctcaaggagctcaccggcaagctcttcagcaccatcgacgatcttgaccatgccgcaaagatcaagagcaccccggaggccgagaaatacttcgcagcaaccaaagatgcgctcggcgacgtcctcgccaagctagcctagatggaagctaatagatgggttaacgatggccacgtaat

SEQ ID NO: 16319 - DNA, 374 bp, Zea mays
  Clone ID: LIB83-009-Q1-E1-H9
gacgcaggcctctacacatgacgtcatattaacgcgtgggcgatcgaaacgtggtcttgaattaactatgatctctatgagcctggagatggatcaacccgtcgtgcgttgtttcattttgtgatgaatgggagagagggtatgggacaagattgatcaacccgtcgtgcttacgtctcgttaattaggagagctaccgctcggatttggtgatttgtaatacaacaaccagtgatgaacaacttcattcacatgtacacatccatcttgaggtgaccgaagatattagacgcaccaaggtgaggacgaacaatagacggttgacacgtcagtgcccagcgccaagctacctccaaacaaaaaggggggccgcc

SEQ ID NO: 16320 - DNA, 353 bp, Zea mays
  Clone ID: LIB83-010-Q1-E1-A1
aacaaggatatagctagcgaacaccctgagagattttttgttggtgaaatagtgagggaaaagatttttgttcagtacagacaggaaattccttattcatgccaggttaatgttgtcagttacaaaagtcggcctacggccaaggccttaattcaggttgagatacttgtggagaaagaatcacaacgaggcattatactagggaaggatggcaacagcataaagatgctggcaaccgcatcgaggcttgacatccaggactttctacagaagaacatctaccgtgaggtggaggtcaaagtgaaggaaaactggcggcaggaccaactactcctgaagcggtatcgctacgg

SEQ ID NO: 16321 - DNA, 391 bp, Zea mays
  Clone ID: LIB83-010-Q1-E1-A10
acgggactgctggcgacgtcaaggccgcgctgtaccgagcgctggacggcgccaacagagggatattcgggatgacgtccgccaagcgctcggagatccatggcctggtggagctgctcgagtccaggaaccccacgccggagcccaccgccaagctgcaggacaaggtggatggatgctggaagctcatctacagcacgatctccatactggggaagaagagaaccaagttagggctgcgagatttcatcagcctaggggacttcctccagataattgacgtcaaacaggaaaaggcggtgaatgtggtagagttcagcgcgagagcactgaagatactgacggggaagctcaccatcgaggcttcgtacagagttaccagccaaacaag

SEQ ID NO: 16322 - DNA, 390 bp, Zea mays
  Clone ID: LIB83-010-Q1-E1-A11
aagatcaagctggagcctgatctgattcatgtttttttctagattaccacagttgatgaagcaaagaaattatacatgttatttgtcattgtagcccagaaaagataatggaaacattagccccaaggacaaataacatgtataatttctgggctacaatgaagtatttctcaaatttgcgcaagacattgggtcctggaattgatggctgggaaatatctttggaaggaatgatgagcatagtggtacttcttggacttgcatctattggggagtgagcaagtttgttttgaatgatccttcattgtcaaagtcttatcgtaagaagaaaaagatgtcgatccacccgtcaagaacaaggtgcagcggagatctttctcctcgtcgctg

SEQ ID NO: 16323 - DNA, 430 bp, Zea mays
  Clone ID: LIB83-010-Q1-E1-A12
tcgtctagcattctcgggtcgatacactcgtccacgctacgccgctgccgcgtcctccgcctcctccggcgcgaccccagccgcgtccggctccgtctccttcgcccgcgcggcgcgggggctgccctccctccgcctggccccgccccgccgccgcggggacctcgccaggccccgcgccgcggccgaggccgcggcggagagctacgcgtccgcgctgtcggaggtggccgtcgagaacggcaccctcgagcagacggtctccgacctggagaagctggagaaggtcttcgcggacgaggccgtcgccgagttcttcgacaaccccaccgtcccgcgcgaggagaatgccgagctcatcgacgagatcgccaggtcgtccgagctgcagccgcacgtcgtcaacttcctcaacgtcgtcgtcgacaac

SEQ ID NO: 16324 - DNA, 287 bp, Zea mays
  Clone ID: LIB83-010-Q1-E1-A3
aaaaaaatttttaaaaaaaaattattaaattaaattggccggttcttttcttttttttttttcttttttttttcttcttttttttccttctttttctttttccttttatttttctttttttttttttctttttttctcttttttcttttcttttttttctttctcttttattccattttttctctcttcttcttttctttttttttcttctttttctccttcttctttttttttttttttttttttctttttttttttcttctcttctctttcctttttttttttct

SEQ ID NO: 16325 - DNA, 422 bp, Zea mays
  Clone ID: LIB83-010-Q1-E1-A4
caagagccaaccagcgcttgcgaagctcaagcgccgcagcaatgtctctggccccgtccatcccttccatcaaggtgaaggtgggggccgtctcggtcgctcctccacaccgtgcatgccggtccttcgcggtgatcaggagctccaaggcagagggccccatccggagacctgcggcgcctccgctgtcgccaccgccaccgatgccacccaagacgccggctctgtccactcctcccaccctgtcgcagcctccgacgcccgtgaagcccgctgcgccacccacctcgtcgcagccgagtcgaccttctcctgagccgaagccagttgacgccacagcccagatgcggaagccggtggctggggccatgacgctggagtagcagaggaacgtggccaaggacctgcacgagtacttcaag

SEQ ID NO: 16326 - DNA, 420 bp, Zea mays
  Clone ID: LIB83-010-Q1-E1-A5
gagtcacgacgtccgagaagcccttattcctccagcaggggctcgtgttatgtccctaactgatggtctctccaagatgtccaagtctgctccttcagaccagtctcgtattaaccttcttgacccaaaagatgtgattgcaaataagatcaagcgctgcaaaactgactcattcccaggtatggagtttgacaacccagagaggccggaatgcagaaatcttctctctatataccagattatcactgggaagactaaggaggaagttgttagtgagtgccaacacatgaactggggtacattcaagactattctcacggaagctctaattgatcatttgcagcctattcaggttcgttatgaggagataatgtctgatccagcctacttggataatgtccttttagaaggagcagtaaa

SEQ ID NO: 16327 - DNA, 398 bp, Zea mays
  Clone ID: LIB83-010-Q1-E1-A6
ccctgaccagattcgggcagcttgggaccatttcaaaatacaggaacgtttcaagattcatttctcccatctctcagccatctacgacgaacataggtccatgctgtagcttcagctcgtcttctgatggcaatggatacatggctggaaactttagcgacagtgatgaagattatgttaattctactgtgctagaagcagttgaggtgagaagtggatcggaaggatatgtgataaacatgcgagatgggaaaaacttgcgttgtgtccataacaattctcaagggagaaatattccagagagtgcagcccaaactgctattgttttgaggattgaagattgaaacgaaactttacttccaatcaatgttttggagatgccaagtgtacttctgatg

SEQ ID NO: 16328 - DNA, 410 bp, Zea mays
  Clone ID: LIB83-010-Q1-E1-A7
acacgagactagggatttcccccttgcaatcacgaatccatggcggatgctgaacctgttgatcagaagaattaccttgaggaacgttgcaagccgcaatgtgtaaaaacattgtatgattatgagaaatgcgtcaagagagtcgagagcgacggaagtgggcagaagcactgcaccggccaatatttcgactactggtcatgcgttgacaagtgtgttgcaccaaagctcttcgacaaactgaaatgataacggaacgcaactttgaaggcgcggctcctttcaggaagtcaaatacctttaataaacccatgccttggcttctggaatttgtttgctgaacctgtggcatggagcctcaattggatacgttttgctgaaccgtccttgtttttttcccctgaatctgt

SEQ ID NO: 16329 - DNA, 387 bp, Zea mays
  Clone ID: LIB83-010-Q1-E1-A9
gacgacttgtttcattgattcttgaagagatcgagcttcttttgcaccacaaggtcgaggatgtcttgcaactgcggatcaagctgcggctgcggctcaagctgcaagtgcggcaagaagtaccctgacctggaggagacgagcaccgccgcgcaggccaccgtcgtcctcggcgtggccccggagaagaaggccgcgcccgagttcgtcgaggccgcggcggagtccggcgaggccgcccacggctgcagctgcggtggcaactgcaagtgcgacccctgcaactgctgatcacatcgatcgacgaccatggatatgattattatctatctagcttgtggtggtggttgaacaataataagcgaggccgagctggctgccatacat

SEQ ID NO: 16330 - DNA, 273 bp, Zea mays
  Clone ID: LIB83-010-Q1-E1-B1
gtgacgatcggaggccatgtgctgcgcgaaggtgagtggctgtcgctgaatgggtcgactggtgaagtgatccttgggaagcagcggctttccccacaagcccttagtggtgatctgggaacttccatggcctgggtggatgacgttagaaagctcaaggtcctggctaaggccggtgcccctgaggagtcattgactgcccaagacaaggggggcaaagggattgggattatcccggacagaccagatgtcctttgcttcagacgagaggat

SEQ ID NO: 16331 - DNA, 388 bp, Zea mays
  Clone ID: LIB83-010-Q1-E1-B10
accttcggcgaggcccgcgtgacgatgcgcaagacggcggcgaaggccaagccagcggcggcgtccgggagcccgtggtacggccccgaccgcgtgctgtacctgggcccactgtccggcgagccaccgagctacctgacgggcgagttcccgggcgactacggctgggacaccgcggggctgtcggcggacccggagacgttcgccaagaaccgggagctggaggtgatccactcccgctgggccatgctgggcgcgctcggctgcgtcttcccggagctgctcgcccgcaacggcgtcaagttcggcgaggccgtgtggttcaaggccggctcccagatcttcagcgagggtggactggactacctcgggaacccgagcctcatcc

SEQ ID NO: 16332 - DNA, 53 bp, Zea mays
  Clone ID: LIB83-010-Q1-E1-B11
ctcgcgggccgacacaagcgtctacagtcactcgggcgaacgcgtgggttgat

SEQ ID NO: 16333 - DNA, 387 bp, Zea mays
  Clone ID: LIB83-010-Q1-E1-B12
acccacgcgtccggcaatggccaacaccacatgcctccgctcccgcctcctcgtcctcccaccgccaccggcgccccgcaccgtcgtgtcctttcgtctccgcccatgcgctactacgatctcctcgtcctcccgaaagaggagaccccgtctcgcggcacgggcggcgccgcccggcggcgctgtggccccggcgtcggccgcgtcgaaggaggatgaccagggggagatgggcagcggcgggggcctctctgcggatgatgcagagaggctgtgtcagtttctgcgggccgacctgccgcacctgttcgacgacgtcggcatcgaccggtccgcgtacgatgaccgtgtgcggttccgcgaccctatcacccgccacgacaccat

SEQ ID NO: 16334 - DNA, 413 bp, Zea mays
  Clone ID: LIB83-010-Q1-E1-B2
gttctttgtttcccgtcccatcgtgtgtgagcgcgtctgctggtctgccaagaggaggaaaggaaggaggagcaagtagagatggcttgccctgcgcagtccatgctctccgccagcggctgcatcttcctgaggagcaagcctcaggcggcatcccaagtgcgagggggcatcatcggcggtggccgcagcagcaggccgttcctgctcacctgcaacgcttcctcttctccgtccccttcctcgccggcgccggcgcaggaagaccccgactgcaacgaggaggagtgcgccccggagaaggaggtcgggagcctgagcgccgagtggctggccgaggagaggacccaggtcgtcggcactttccctcccaagaagaaatggtggaccggcttagtggagaaaggacacgc

SEQ ID NO: 16335 - DNA, 306 bp, Zea mays
  Clone ID: LIB83-010-Q1-E1-B6
caagaacgcagaaccgagacccacgaactcgcagcagaccagcagccatggtcgcccccgcaacgagctccctgctgagcacgctgctgcagctaccgctcgctccgttctcggggaagagctcgccgccgtccgtggcgcacgtggcgcgccgggcgcctacggcggtggtggcggccaacgggtacaacgtgcagattctattggacgagaacgaaggggaggagtccatcttccgtaggttccggcgggaggtgatgcgcgccggcgtgctgcacgatatcaagctccgccgggaggtacgag

SEQ ID NO: 16336 - DNA, 330 bp, Zea mays
  Clone ID: LIB83-010-Q1-E1-B7
aagaggactctccgactaaagcatctgcgggtggctcgatgaatgtcaacctcttcataaacgaagatacctaaggcggtgccgacagacgtaatgacctggacatgaatcctggctggcaccatttgtccctgtgccttaatttcatgcaagctttcctcacacaaaagtttatgcgccacaccgccaaaaacgtgcgacgtgccaatcgcactacaggatacatactgccattaactctgaagcaacttcttacctcttcgacgctcacacataaactcatgacagaggccctcattttaacacctcctgaatggcaaaacacgtatg

SEQ ID NO: 16337 - DNA, 400 bp, Zea mays
  Clone ID: LIB83-010-Q1-E1-B8
cccacgcgtccgtttttctccataacaactgaagtgggagaacatcccgtcgttcatcgggactttccgctggtagttctgtcgggtggttgttttaatttattcatcatgggggacaaggtgaatccctggtgccattggcctaatcctcaatggaaattcaacactgagagttctgccggcaatctgcacccacctgatgttgggcttgctaatgccaattcggtggcattgcctgcataccaccttaacacagttgctgcacctatgccatttttcgcagcatcgtcgattgctgagagacctcttccaataatgggcccgagacatgtcacgacgttggcaccaagtttcgaatcgcctgcaccgtgtccctcacgtaagagacctccaatcctct

SEQ ID NO: 16338 - DNA, 388 bp, Zea mays
  Clone ID: LIB83-010-Q1-E1-B9
atctgattacaaaattctaataatctattaacaggtttcctttccagaaagacctgatctgaagtctgtagtgcttaaagagcaaccattctctttgcagagggaaacatcgatgaacaaaccatttttcatgctgttgacattaaatttcagtgatggttgcagctgtttgagctcctcaattggatggcctgttgattttcagaagcgaaaagacagcttcgtcagagatagagctctagtcctacgggagttgtactctgctgcacagcgcgagtcttgcattgggcaacaagaaattctggaaagagagaacctaccaagagctgagacgtctattcatggaatcgtgacaaacatcgttaggtatgacactgaagatgaaaag

SEQ ID NO: 16339 - DNA, 380 bp, Zea mays
  Clone ID: LIB83-010-Q1-E1-C10
actggtctagcattcccgggcccaaccactgcgtccaccaaatcggcctacgcccacggttccacctcctcgtccacgaggtgaggaaaccctagcgaccgaccatggcgttgctcccgcgcaccgcgcggctggccctcctttccaccccgcgggcgtactccgctgccgctgctgcgggcgcctccccgacgtccccagcgccatacgggggcgccccccccaccggcgatgtcgaagacggccgagttcgtggtctctaaggtggacgacctgatgaactgggcgcgtaagggctcgatctggcccatgaccttcgggctcgcctgctgcgcggtggagatgatgcacgccggcgcgtcccgctacgacttcgaccg

SEQ ID NO: 16340 - DNA, 370 bp, Zea mays
  Clone ID: LIB83-010-Q1-E1-C11
acccacgcgtccgcaaccaacggggcgcgcacacgcacactgccaacgaggcaccaagaaggcaggaagggatggagtactgctaccagtacaacagcgtcagcaacgcggagaaggagaagaggccgccgctgaggaggggcggcgtcaagctccagatcgtgaagaccctcagcaacctcgtcgtggcgcccagcaacggcagcgactccaagcaagcggaccgcaacagcttcacaagggagcgaagctacaactgaaacgaactgtatcttcagtatttggatacagatgtcgaccttgtgtctgaagaactccgctttgggactcgagaggttttcttagcttgttggacttccttgtttgcctg

SEQ ID NO: 16341 - DNA, 362 bp, Zea mays
  Clone ID: LIB83-010-Q1-E1-C12
actgatgctattgttctcagcacaactggggagagagatcctgtcacctctgctctgcttattattcttggcagaaaggtgtcacttgatatagctcaagtcgttagatggaaaactagcccaacagctgaggttttgcctactgtacgctatgctgcttcatttgcaggtgatggacaaggatcgccaaggtgcggcgcaaaaacgccaggcggctgtcaggctgcatgaagctaggccgaagaggcagcggggggctgcgaatgctgcggcctccggcggaggcaagccgccgaatgcgggcgcctctgcacctagcaaggcgccggaggcaacggcaggcgccggatgctccaagacaa

SEQ ID NO: 16342 - DNA, 311 bp, Zea mays
  Clone ID: LIB83-010-Q1-E1-C3
agcgcgacagaccgagctcatcgcgcgcaagatgcgccgcctcaccgggttcgtcaacctcaatgtcgacaacgtcgtggacgcgtcactcctcgcccggttccttcgtccgcaagggaacgaagaatcccaagttaaccaacttaaccgtcaagggccagctcgccgcgctccaaaaccacgtcgaatccatcgaccaccagaccgcccacgtccaaggacacccgcaccactgagtatccgatccaaaacctctggactctggtgcaaatgcaccggaaccggactacaccggaggcgaagcgcgccat

SEQ ID NO: 16343 - DNA, 366 bp, Zea mays
  Clone ID: LIB83-010-Q1-E1-C4
accacgcgtccgcaaagtttggttccactacgttggcgctcctcctcctttgtagggagatactctgaaggtgaatcccggtacaaactgcagagccccaaagtgaaagcagctgtgaaggaatacacacaaatttctgcaaagtatggcatttctccagtgaccttagcgattgcatttgtcttgagacatccacttgtggcatcggctgttttcggtgcgactaaattgtggcagcttgatgaagttcttcaggcaactacagtccatctttgtgaggaaattgttgctgagatcaatgatgtacatgcaagataccctaacccttgcccataaaattttgcaaaaaaatctttatttagcatc

SEQ ID NO: 16344 - DNA, 386 bp, Zea mays
  Clone ID: LIB83-010-Q1-E1-C5
actgtactcatctccatccccacaggctttgtcgaggtctcccttgatcggatcgtttccacggtccctgtcagtgtcgtgggaggaccccccgctggaagccacgtcgtcgctgaattccctgagactctggaggcttttctccaaggccgacgaggatctagactcgctgacgttcatccagaagctggtccgctcctgtggcatggaccgagcaagctgcgtgttggctggccctctggacccggacctgctcgagaaggtttcagagcaggaagacgacggaaccaggttcgggaaaaggcggcttcttttcgacgccgttaacgaagcgctcccgaagctcccctgaacggcggaactggccgcgtacccctggggcggcg

SEQ ID NO: 16345 - DNA, 379 bp, Zea mays
  Clone ID: LIB83-010-Q1-E1-C6
agtcgccgctttgggtcggggtttaagcgagtgttcagggaggccgggacggaggcgacgacgacggacggtgccggcgtcggaggagaagaaagaagaagtagccagctctcgtatatgccttcttgccccatctccgatctggtcgtcgtagcgctcatcgcccccgtcgtcgccggcctcctcctcctcctcctccgctccctcgcctgctccagccgatctatgcgcaaggggctcaacgggtggaacagatcctcgtcgatgctcagggacgggttcggggtcaagtattccggattcctccacatacggccgtgcggtttctgtagaggagactgacggattcgtcctcagggccgtgcccgtttctgtagag

SEQ ID NO: 16346 - DNA, 334 bp, Zea mays
  Clone ID: LIB83-010-Q1-E1-C7
aacaatggaaattgaggctttattggatttggatctaaatatactacaggtacagcatccatatgcaactaacagcaacgatcttttctaccttgaagatcagcaacggtatagatgattacagcaccaagtcagtggttaatcatagatagccaaccgcattacgtgcaaacgagcttctgacagatgtacacgtacacggcgagggagaactctcatgagcgtgatgtccttccagtcccctttcggcttggggctcaagctctcccgcgctgctatccctccctaataaaagcgaggggcagtagttaaaaaggggggggccgcccaggag

SEQ ID NO: 16347 - DNA, 402 bp, Zea mays
  Clone ID: LIB83-010-Q1-E1-C8
agtgttcgtttcgagaacgcacgcacagacgccatggaggtgacaccaaaccacaccctgaccgtgaccgggtgggcggccatgaacgagtccgccggcaaggtggagcccttcgtcttcaagagaagggagaacggcccggacgacgtgacgatcaaagtgcagtactgcggcatgtgccacacggacctgcacttcatcaacaacgactggggcatcaccacgtacccgctggtcccggggcacgagatcacgggcgtggtcaccaaggccgggcgcaacgtcacgggcttccgtgtcggcgaccgcgtcggcgtgggctgcatcgccgcctcctgcctggactgcgaccactgccgccgctccgaggagaactactgcgaccgtgtggcgctcacctac

SEQ ID NO: 16348 - DNA, 377 bp, Zea mays
  Clone ID: LIB83-010-Q1-E1-C9
acccacgcgtccggccgcaccagcgccagcccgcgccgtggtcagaaggaggtccttcaccgtgcgcgcctctctccgcaaggccaccggcaccgccgccgtggcaatggctgccagcgccctgcttgccggcggtgccatggcccaggaggtgctgctgggcgcaggcgacggcgggctcgtcttcgagcccagccagttcaccgtcaaggccggcgacaccatcacattcaagaacaacgccggcttcccgcacaacgtcgtcttcgacgaagacgaggtgccgagcggcgtcgacgccaccaagatctcgcaggaggagtacctcaacgcgccaggcgagacctactccgtcaccctcaccgtgccgggaacct

SEQ ID NO: 16349 - DNA, 397 bp, Zea mays
  Clone ID: LIB83-010-Q1-E1-D1
caacttttctgggaagcgctgctgtagctggtacactacctgaatcaattttacaagtatcagataagagtggcactacactacaagatgttctgaaaatgaattcttttgaggctacctctactgctattagtcaagccaggtacaacccggagtctgtggggagttatgttgaggtacacatggagcaaggccctgtcctggaagcccttcattatccacttggtgttgtaaaaggaattgcaggacagacacgattgaaggtaatagtagatggttcgcaagggcatgctggcacagttccaatgaaattgcgccgtgatccgatggttgcagctgcagagctcgttgtgactctggaacgcctctgttaagagcccaacagtttgctgaccta

SEQ ID NO: 16350 - DNA, 370 bp, Zea mays
  Clone ID: LIB83-010-Q1-E1-D11
cccgagaattggcaaggaggcgatggcgcggcggcctataggtttgggcctggcccggcagtgctcaatctgacctacacagagttgacttgggacaggggaacttggaaaggacagagaacatcttattttcctatttgttgttttctttgcataggggaatgagacgatggttactattcagaatgtcatttcggtgattgaagggggagaagaacctgaacggtatgatcaaaatccccaatcaccttacccccaatacctccttccaaactccaatttaggtaaggggcactgtatcatctacagtacaaatccgtctgtgggctcaagcattcagcctgaatgcgatggatggaaatttaacctt

SEQ ID NO: 16351 - DNA, 406 bp, Zea mays
  Clone ID: LIB83-010-Q1-E1-D2
cttgtcatggcccacaccaggagagctagatgatctatttgccatctacctgaagagcattcctaagcctgagaagctatcaaggttgcagtacctgctcggcattagcaacgagaaggctaacgagatgcaggacgcagcctcggagggatcgctgccggttgcagctgaagagaaagaggagttggcgttctaggaaggggtacagttttgttagggtagccaccggagttgaggtcccttgccaaggaacgaacgaacttggtgcctgtggcggacagctgctattgtagctaggcgcatacatgtttttggaaaaagaaatcgagtgtaacactgacatatttattgcatgtctatctgtatagacaagtcaataacaccgacgctgttccgctgttgcatt

SEQ ID NO: 16352 - DNA, 323 bp, Zea mays
  Clone ID: LIB83-010-Q1-E1-D3
cccacgcgtccgcggacgcgtgggcgatgaccttggcggcgagttctgcgaggcgccgtaccaggacggcgtctccaaggagctggcgcacgcctgaagaccctgatccatccatttctgtccaccacgctatgtacgtatgtgtagcagatggtttacatctacgtgttagagcccggagagctggagaagctagctagcgtgcttacagaataacagcagccaagcaaagccaagggtgtgtatataataggcatgccttgggttgtgtcagctgcgactgtatgtatagtttaaaccaagatgaaatggtactgatggtg

SEQ ID NO: 16353 - DNA, 363 bp, Zea mays
  Clone ID: LIB83-010-Q1-E1-D4
caggaatacatgatgcactcacatcaaatagctgacgagaacatggatatgtgcagacctgcagaaggctttgcatctcacttagaagaattctgccggtcccaattcagattcttcaaggccaaagttaaaaggacagttattggataccgtgtcatgttcctgcagcaaggacgacaccaattcaacagattgtctaatagacgagcaccatacaagccactattttgcaaactcaaagcatgaactgccctctgtatctaacgaaaacgaattcaagtttgcaagaaacaaccacaatcgaattcttgcaagtgcgtcccataaacatgaaagtgttgcacaggccatgttctgtgcacc

SEQ ID NO: 16354 - DNA, 416 bp, Zea mays
  Clone ID: LIB83-010-Q1-E1-D5
ccaagaagtgccctccactttgtaagctcgtttccgaaaagagctctagagccgccacacacacacacaccatggcaccgcgttctctgctggcagtgctcgccgtcgccgccctcgcgctcttgcacgccgcctcggccaagtcgtcgtggcttgacaggaggttcaccacggacggcaccgtccgcacgggatacgacgattcgggccagcaggtggtgatgctccgcctcgaccagcactccggcgctgccggcttcaactccaaggagcagtacctttacggcgagttcagcgtcgagatgaagctcatccgggggaactccgccggcaccgtctcgtgcttctacctctcttccggcgacggcgacgggcgcgacgagatcgacatggagttcatgggcaactcgagcggg

SEQ ID NO: 16355 - DNA, 290 bp, Zea mays
  Clone ID: LIB83-010-Q1-E1-D6
accacgcgtccgcggacgcgtgggcggacgcgtgggcgcagagcatcctggccatctgggcgtgccaggtggtgctcatgggcgccgtcgaggggtaccgcgtcgccggcgggccgctcggggaggtggtcgacccgctgtaccctgccggcagcttcgacccgctcgggctcgccgacgacccggatgcgttcggcgagctcaaggtgaaggagatcaagagcggccgcctcgccatgttctccaagttcggcttcttcgtgcaggctatcgtcagcggcacggggccc

SEQ ID NO: 16356 - DNA, 224 bp, Zea mays
  Clone ID: LIB83-010-Q1-E1-D7
aggtcacgatcgggggcacaggagccatccctgccctcgtggtcttgctgaccgatggcatgcagcgcgggaagaaggacgcggcggctgccctgttcaacctgtgcatctaccaggggaacaagggccgcgccatacgggctggcctcgtgccactcgtcatggggctctttacgaaccccaccggagctctgctggactaggccatggcgattctgtccata

SEQ ID NO: 16357 - DNA, 360 bp, Zea mays
  Clone ID: LIB83-010-Q1-E1-D9
acgtcgatgccaccaattgctactgctatcaagagcaggaaggaaacaccgccgccgccgcgccttccattccagtactcgcggaggaaaggaacaccagccagcgccatggtcacgtcaacgaccgccgccgccgtgctgtccccgccgtccgtggccgggcttcgcctggcgccgtcaccccgggcgcgcgtggctttccgcgcggtgcgggcgcaggggtctgtggcagctcgcgcggagctgaacccgtcgctggtgatcagcctgagcacgggagtgtcactcttcctgggctgcatcgtcgtcgtcaacttccagggggagaacatgtgcaatcaagtgccctaacagaacggc

SEQ ID NO: 16358 - DNA, 221 bp, Zea mays
  Clone ID: LIB83-010-Q1-E1-E10
agcagtatgtgaataaagcttaccatctcattagataagatggtagaacagctgctgatgccttagccactagccagaacagctgttctaccatcttatctaatgagatggtaagcagtatgtgaataaagctggtgttgcttaccttcagtttgtgaatgccattatgtactgtaataaaaaactctgtattgtactccctagcattatcattatgcttt

SEQ ID NO: 16359 - DNA, 366 bp, Zea mays
  Clone ID: LIB83-010-Q1-E1-E11
agaggtcttcagaagaaacatcatcttcgtggtaggccgcaacggtcgcctctaccagtacaacaggatcacggagctctggcacaggcactaccaatcacctcacctgttcctatcgtgctccccagggacggccatgcggccatcgccgctgtccctggccggctccctgttcatggtgtccgagcacggggggctggtggagtaccacttcagcccacaggacgggtgggagtgggtagagcacgggacgccccaccggggcgtgaccctcgtcggcgcccctggcccgtgcttcgacggctcccagctgttcgtggtcggctccgacgggcacgtgtaccggcggcacatggaggggaggac

SEQ ID NO: 16360 - DNA, 88 bp, Zea mays
  Clone ID: LIB83-010-Q1-E1-E12
cctatattgagtcatattacagcgtgggatcacacggtgcactcaacggaattcttgggtacacagaccaggacgttgcttcccaaga

SEQ ID NO: 16361 - DNA, 406 bp, Zea mays
  Clone ID: LIB83-010-Q1-E1-E3
gcagaacgtgtagttatatgtttcggctaattgccaagagcatggcatgtacatccatatgcttctgtgcacacaacagcgtcattgatgtacatggcagagagattattggattacaattcatgttcttttggggagaaaatcttcatttgttgagggccaccgagaggccaacagagagtatgaaccacgccagtaagaagtagccaacgagcttggttgggaactcatcttctggttcctttggaggatctggtgccaactccaatggatcaacttcaaatggccagacatatcgctcaggctgtctacttcttgacaagctccaatcatataatcttcgttcttcctccgttgatagtatagtaaatgattcctttaggagctcatgttcctttgttaagct

SEQ ID NO: 16362 - DNA, 400 bp, Zea mays
  Clone ID: LIB83-010-Q1-E1-E4
ctctgtttcgtcctcatcgaatcggagtttcgcatggagtcatcgcggtctcggaagcggacgcgccagtcgcatgactgtgccaccgctccgccagcagaacgagaagtggtagcgaggggtggcgcgtcgccaccatggagggatgatgaccgtgatggacaattcgtagtcggacttggcgagaacttgagccgccgatataaaatcttgagcataatgggagaatgtatatttgggcgtgttttggaatgctgggaccgtgaaacagataaatatgtagccataaaagttgttcgcaatatctgcaagtaccgtgatgctgcaatgattgagatagatgtgctcaatcacctttcagaaactgaaaagtacagatctcgttgtgttcaaattcaga

SEQ ID NO: 16363 - DNA, 420 bp, Zea mays
  Clone ID: LIB83-010-Q1-E1-E6
acggacgcgtgggctggaaaccctagccgccatatctcacgatccactcgagcaccaagccgagggaaggtgaggagcgatggcgcgcggcgtggtgtcggcgaagggcggcgcggtcgcgggcaagaagaaggggtcggtttccttcacgatcgactgcaccaagccagtggaggacaagatcatggaggtcgcctcgctcgagaagttcctgcaggagcgcatcaaggtcgccggcggcaaggctggcaacctcggcgactccgtcaccatctctcgcgagaagaccaaggtcaccgtcacctctgacggacccttctccaagaggtacctgaagtacttgaccaagaagtacttgaagaagcacaacgttcgggattggctacgcgtggttgctgccaacaaggaccgaaacgtcta

SEQ ID NO: 16364 - DNA, 221 bp, Zea mays
  Clone ID: LIB83-010-Q1-E1-E7
cccacgcgtccgggaggacgcacctggcttccgccagcgagtcccgcgccgcgggtggcggcggcaagcgccggaagtggctcgccgcgctgtcctgcgtttgcccagtggtgtcccggatgcggcccaaggccgacggtggcaagtcgtccgcccccgtttgggacgagtccatcatgtcgtggtacctgtccgtgagaccggcaagttccggttcccgg

SEQ ID NO: 16365 - DNA, 116 bp, Zea mays
  Clone ID: LIB83-010-Q1-E1-E8
acaataaccactacaagggtgaagttgttctgctgttctagccagtgctaatcctctcccttgctgcagagttaagttgttcctgagctgtgtcagcgcccctgtgtggtgagcac

SEQ ID NO: 16366 - DNA, 416 bp, Zea mays
  Clone ID: LIB83-010-Q1-E1-F1
aaccaaacttactgaggtgtctgtgagtgacaaacttgaaggcttccgtgcaacaaaagagaactttaaaggtttgagttttcctacaatttcatctgtgggaccaaatgcagcagttattcactataaacctgaagcaagcacatgttcggaaatggatgctgataaaatatatctttgtgactctggggcacagtacctggatggtacaacagacattacaagaactgtacattttggtaaaccctcagcacatgagaagtcatgctacacagcagttttgaaaggccacattgcactagacattgctgtgtttcctaatgggacgacaggacatgctcttgatattctttcacgagcaccactctggagagagggtcttgactatcggcatggtacaggccatggaattggat

SEQ ID NO: 16367 - DNA, 330 bp, Zea mays
  Clone ID: LIB83-010-Q1-E1-F10
aagcgtgaaccatatcatctgatatacttcaaatcaagtacattcaattctgaacatcttctttcctagtacaggcactacatttctttcaatcccagagaaaagctgcagaaaatgaatacctcattacatcaaacttcgaaaagttcagctccaacagaatcatagcttaacctcaacatccacaccggcaaggaactggagttgcatcaacgaatcaattgtttgggcagttgggtacatgatatcaatcagccgctgatgcgtccggatttccaaatggaaccgtgagtccctgggcaagtgaggagagttaagcacacaataaac

SEQ ID NO: 16368 - DNA, 360 bp, Zea mays
  Clone ID: LIB83-010-Q1-E1-F2
ctttcacgaattccccagggtacggtccacttcgctcgcaaccttccccagccatggcgaccgcgacgcggaggctgctccccgcgctcctcaggaccctagctccagccggcgcgcgcggcctctccaccgagaaggctgttggcgcagccgccgtcgtcggcagccacaccgctaagtggatgcaggacacaagcaagaagtcgccaatggaactgatcaacgaggtagctccaatcaaggttgatggtcgcattgccgtctgtgaaggggcttcttaaggtgttggacttggcgacccagtcgagtacatctgccttgatctggaggcacctaatgtgtgtaagtactgtgggctcc

SEQ ID NO: 16369 - DNA, 398 bp, Zea mays
  Clone ID: LIB83-010-Q1-E1-F3
ctttcaaaggaacttaaatcagttcaagatcaactagcagcagagggttcaagatgccagaagcttgagtcccaaattgctgctgcacggaagagactggaatctgctggttctttggagaatgaactagaagtattgcatcaacatatatctcaggtggaggaaaccattgcaactactcagagaagaaaatctgggggtgtttggaagtgggtggcgggtagtacagaggtctctgacgatgaatagttgacaagcagcttccgaacaggaaacgtaagcggaggatctgctacagttttgaggcagcttgtctgttgccagttgccgggtgcttcctcaaggtcttgctcatggttgatctcgaaaatatgtctcccgaaataaacttgtttatc

SEQ ID NO: 16370 - DNA, 305 bp, Zea mays
  Clone ID: LIB83-010-Q1-E1-F4
acttccacatcaaggcgttcgcggcgggggtcatcctgggctggccacggggttcatccacatcctccccgacgcgttcgagaagctcacgtcggactgcctctccggcgggccgtgggaagacttccccttcgcggggctcggcgccatggtgggcgccatcgggacgctcgtcgtcgagaccgtcgccactggctacttcacgcgcgtccacttcaaggagagcgccgccgccgccctgggcgccgccgccgtcgggcgacgacgagcagcagcaggcagcaggcggggtcggcgccgcacgt

SEQ ID NO: 16371 - DNA, 113 bp, Zea mays
  Clone ID: LIB83-010-Q1-E1-F6
aggagcaggtgtcagtgcccatatcgaatgcaggctggttttggttggaaacaaaaggctgatgcacgaatttgaagttccgttgagtcctgaggtggacgcgtacatgtccg

SEQ ID NO: 16372 - DNA, 422 bp, Zea mays
  Clone ID: LIB83-010-Q1-E1-F7
cttagggtttccgcgtctccggccgccgcggtggccaaccagctctctggtggggccgcggccccggctcctgccagggtgacggcgcagcgcagcggcgtctcgctgtccgccgccgccgccggcaaggggaaggagtgctcagcggggtggtgttccagcccttcgaggagatcaagggggagctcgccctcgtgccccagtcccccgacaggtcgctcgcgcgccacaagttcgtcgacgactgcgaggcagccatcaacgagcagatcaatgtggagtacaacgcctcgtatgcgtaccactccctcttcgcctacttcgaccgcgacaacgtggccctcaaaggatttgccaagttcttcaaggaatccagcgacgaggagagggagcacgccgaaaagctcatggagtatcagaac

SEQ ID NO: 16373 - DNA, 415 bp, Zea mays
  Clone ID: LIB83-010-Q1-E1-F8
ctctgaagcgtgctggcgtccctgaggacgagatggcagctttggaaaggcaactggctaccggaccatctactgccccaccagcagcaccaagcactgccccagcctctgctaacaggatgatgaactttgtcagtgctggagtagaggcccaggttgagagcagcaggcaacaggctgctaacaatgaggacattgagctgcccgatgagagtgacgatgaggaacccgatgtccaaattgcggagaagagcgttcctgctgcggtatttggtgagctcggcaagagagctgccgagaacaacgaggaaagttcaggtgcccaagggaatgagcagctgggcgccctcgagaggataaagagacgacgccaatagtctaactctgcctgccaagatgagaacccatgtgtgca

SEQ ID NO: 16374 - DNA, 392 bp, Zea mays
  Clone ID: LIB83-010-Q1-E1-G1
gcgtcatgcttgccggcggcggcgccatggcccaggaggtgctgctgggcgcaggcgacggcgggctcgtcttcgagcccagccagttcaccgtcaaggccggcgacaccatcaccttcaagagcaacgccggcttcccgcacaacgtcgtgttcgacgaagacgaggtgccgagcggcgtcgacgcctccaagatctcgcaggaggagtacctcaacgcgccaggcgagacctactcggtcaccctcaccgtgccgggcacctacgggttctactgcgagccgcaccaaggagcaggaatggtcggcaagatcacagtcaactaagagctagccatccattccatgcatcccgatctgtatgtactccgcccgtccatggatgatgcatcc

SEQ ID NO: 16375 - DNA, 388 bp, Zea mays
  Clone ID: LIB83-010-Q1-E1-G11
ggcgaccataactaagatgtgagatttggtggcgtcagctcggctggtgggtgattcttggtgcgtacacagacacatccctggaggcctggaggcttggcgaggaggacagtgcaggagagagatgtctttcaggagcctgattcaggacatgaaggacgagttcgggagcatctcgcggcacagcctgcggtcccggtctcaccgctccgccgggaacgcggcgcgggcggtggccgcgggaccgtcggaggcgatggatcagagctgctggtcgcagctgccccccgagctcctgcgggaggtgctggtgagaatcgaggcatcggagagctggtggccagcgcgcaaggacgtggtgtcaggcgccggcgtctgccggacctgg

SEQ ID NO: 16376 - DNA, 53 bp, Zea mays
  Clone ID: LIB83-010-Q1-E1-G12
ctcagacagacacttcgagactgacgcactgggtgcgccttcacctacgtctt

SEQ ID NO: 16377 - DNA, 205 bp, Zea mays
  Clone ID: LIB83-010-Q1-E1-G2
cgggtcgaggcacgcgtccgcgtttcaacccccggccaagctgccgctgcaggggcgtcggttcgctagccccaaaacggggggacgtatcagcgtcatggtctctcaggcgctaacgcagcaggagcagcacgtgaacgaggaagatgcgaagtggcgagcgtgcccagccacacgacgcggataagcaggccaggaacgggga

SEQ ID NO: 16378 - DNA, 321 bp, Zea mays
  Clone ID: LIB83-010-Q1-E1-G3
gttgactcctcaagttgcagtatcacatcaggtagctctgttattctgtataggcctagcaccagcaagatgaaaaagaagcaacaggttgatgaaaatgctaggaggttttcaagaactgaagaaggaaacgctaggcggtttgcgaaatccgaagaatcatttgaagaacgccctagaaacagaccaagcagaagatctgttggatctggatccacatttaagggggcgcaacagaagagaagaccgatggcatccaacgggtcttcgtcatatggccgaggatagcagtggcagtaaacactatatgcgtgctttttt

SEQ ID NO: 16379 - DNA, 395 bp, Zea mays
  Clone ID: LIB83-010-Q1-E1-G4
gggtcgaggcacgcgtccgcggacacgtgggagagaagctagcgttcaacagaggaagaagcgagagagctgacaagaatcgactgccatcaatggctctggcgccggcgcctctccagtgcttcctcacgagcagcagaccggccgtatgcacggcgacgccgcccaataagcgcgcgaggaggccgtcgaggatctcgtgcagggcgtccggcgatgacaaggacaaggtcccgtcgtcgggagggagcgatcttggggtcaagcagctcgggaagctggccatggtcgcgctggccgccggcgttctggtgctcggccccgtccacagtgccgtggcggccaagtccgggagcaaggtctgccggcaggcgttccggtccgcgcgccggtcc

SEQ ID NO: 16380 - DNA, 421 bp, Zea mays
  Clone ID: LIB83-010-Q1-E1-G5
cccacgcgtccgcggacgcgtgggttcgtcggtcgctgtggcgacgggtgattgactgcgatatgaggcaatggttatgttgtaactgccactttgatgacgaggaagatggccatgacaaggaacaggccaaagctcatagcaataagatagaccccaagcagaagtcttcaaaacctcctgttagtcaacctgagccagagttctcccctccaacaattgatgttcctgaattgtcattggatgatttgaaacacaatactgacgattttggatcaagtgctctgattggtgaaggttcttatggacgagtatatcatgccgccttagatgatgggaggcaagccgcagttaaaaaacttgatgcatctgaaaatgaccctaatgatgagttcctcaaacacgtctcaacggcatcaaa

SEQ ID NO: 16381 - DNA, 375 bp, Zea mays
  Clone ID: LIB83-010-Q1-E1-G6
acccacacgtccggcaccttggagctggagcatgtgctggtatcatagctatgtctgctacttacccgatggatatggttaggggaaggatcactgttcagacagacaaatctccctaccagtaccgtggtatgtttcatgcactgggtacagtctaccgtgaagaacgctttcgtgctctatacaaagggtggcttccatctgtaatcggacttgttccatatgttggtctcaactttgctgtatatgagtccctcaaagactggctactccagacaaattcatttggccttgcaaatgactactagctgcacgtagttacaaggcctgggtctggagctgtggctggaaccactggccagaactgttgcagac

SEQ ID NO: 16382 - DNA, 403 bp, Zea mays
  Clone ID: LIB83-010-Q1-E1-G7
cccacgcgtccgcccacgcgtccgcccacgcgtccgcccacgcgtccgcccacgcgtccggggctggctgctatgttcgaggcgcatctgaaggagctcgacgcgccgttccacgaggcacccgacaaggcaggctggttcttgacgacgaacgttgctgccaagcaatggctggagtcgaaggcggcatcagaactagtaactgtgtaaactggttactctggcgcgtacataggattatttttccgtgtaagctacatgtgttctccgatatatgcaggtgaagatgttgagttagcctatctccgaccttactcatccgtatacctatattcaaatttcactctacgatttataatgaaatttaaaatagatcttaaataagaaaaaaataggggcagat

SEQ ID NO: 16383 - DNA, 416 bp, Zea mays
  Clone ID: LIB83-010-Q1-E1-G8
cgtgattcgtgaacggcggcgacaagaagccgggagagatgccgctggccacaactgctccgccgccctgtcctccgccgagtccagcagcggcaccagtccggacgcagctcctctcctccgtcgcgaagctcgcgctcacggccgcgctcgtctgcggctctggcggtcccgctgccgtcgtcgtcgtcgttccggccgccgctcaggccgtcccgttcgtccgtcctcctcctcctcccctgcaaggaaggcccttagcgtcctccactccttacgcgcagtcccagaagctgcagcttggcctcgacaagctcggaaatatcaggccatgcgcgtcaaacaacccggggtgcgtgtcgagcaacccgcggggattctcgggccctttctcctcgacagggctcatccgggga

SEQ ID NO: 16384 - DNA, 404 bp, Zea mays
  Clone ID: LIB83-010-Q1-E1-H10
ctccaggcgtcaggtggtgtttgtggacctgctttgattaaaaggttcaaggaagagataaatgaactgggacttgatgatcaggtggctgtcagtgcatgctcacacgtgggaggtcataagtatgcaggaaatgtcatcattttcagttctgatgccaagggagaagtgactggtcattggtatggttatgttgttcctgatgatgtgcctgttttgctgcataaacatattggacaaggagaagttgtggaccatctatggaggggacagataggtttatctgtggagcagcagaagcgagctctcgagcttcggaacatggtaaatggtggcgaagaatcccttgaagaaaccagaacagatggtgcttctttcagccctgcagcagctggtggatgctg

SEQ ID NO: 16385 - DNA, 366 bp, Zea mays
  Clone ID: LIB83-010-Q1-E1-H11
gagaagtgccacaaactccgcaaactgcatgtggatgggtggcgcacagacaggattggagatttcggactcatggctgtggcacgaggatgtccagatctgcaggagctcgttttgataggggtcaaccccaccgtgctgagccttcggatgcttggtgagcactgccggttgctggaacggctggcactttgcgggtgtgaaactgtgggggatgctgagatcatttgcttggctgagcgatgggctgcgctcaagaagctctgcatcaatggttgccccgtgtcagatcctgggatggaagcactacatggggggtgccccggtttagtcgacgtgaatctgaagagatgtcgtggagtgtca

SEQ ID NO: 16386 - DNA, 233 bp, Zea mays
  Clone ID: LIB83-010-Q1-E1-H4
ggtcgagcacgacgtccgcctgaatgatgcgcgccatcagactcggacatgtaatatacgagtcatacgacgtgtatattttctcctcctgtaaagccatatgtttttcctagacaagccttgtgtcattcacatggtatgccgtttggcccttctgtaaagatcattgcacagaccgactccaggaaacaaaattttatttttgcaatattgcattgtatgataagttctcc

SEQ ID NO: 16387 - DNA, 415 bp, Zea mays
  Clone ID: LIB83-010-Q1-E1-H5
cacgcatagacacggtagcagtagcgggcgctcgaatctcaccggccccatctctaggctctagctccatcactcggagaagataagacccagagtgtcgcctggtccatctccaatccagcaaggcgggcagacgagccgagagtgagacaaccatggcgtctctggccctccgccccgtcatcccggccaccaccgcttcatccaggaccctcacgatcgtcgttggctcccgctcctgccacgctgccagactccaccgtggctttcgctcgcggcgcctcatcacctgcaaggcggagccgagcggcggcaacagcaccctcgagctgggcgcaggggccgcagggctgggatcgagcgcggtcgtggcgtggtcgctctacacgctgaacacgatggggtgcggcctgcc

SEQ ID NO: 16388 - DNA, 354 bp, Zea mays
  Clone ID: LIB83-010-Q1-E1-H6
cccacgcgtccgcccacgcgtccgcccacgcgtccgcccacgcgtccgcgggaggatttcaatggtcgattctcctagagaggtgattggtgctgttctgaagcatctgggctcatcatataacacagttgatatggaaatggacgtcaatggtggtagagcagcagtcctaaacagctttacgcaactacagaagcaggtccaactattcgacagcatgaactatctgaagtcgtttagtgttggagatgtatgggtcccagtgggttggagcagcgacgtgattcctgctgcaaagcgaatgttcaatgtcgcggtggttgttcccaagtcagggagcagcctatgggctga

SEQ ID NO: 16389 - DNA, 283 bp, Zea mays
  Clone ID: LIB83-010-Q1-E1-H9
cccacgcgtccgcccacgcgtccgaaaataataacacgaaaatcattgttcgaaaattccatttagcggcgccaaaaggagaaatacaagtctcaggagcattactgatagtaaagacaacagacaacagacacctgaagaggccgacgctgcgctacccaaacaaacaggagacaccgcagcaaacagtccacgcaataacagcaacaaccgcatacacaactttagtggcaagttatccaggcactgcaaaagcagacacgggatcgcatcatttcttctt

SEQ ID NO: 16390 - DNA, 360 bp, Zea mays
  Clone ID: LIB83-011-Q1-E1-A1
ccaaggccgggattgccctgaacgaccacttcatcaagctcgtctcttggtacgacaacgagtggggctacagcaaccgcgtcgtcgacctgatccgccacatgttcaagacccagtagagagagatatttctgcctccctatcgtgggtcgtccccaatggcctttggtcgcagaccatctttgctgcttgtctatgctgagaataaatgtgaacggtgcccctggacgctggatccatgctggttttggacacgttgtctttttgtgtttaacttatctgctaccgtcctgtaacgaattcactaagttctagttcttttgtgctttgttaagaatataaacaatgaggtttcaattt

SEQ ID NO: 16391 - DNA, 354 bp, Zea mays
  Clone ID: LIB83-011-Q1-E1-A10
agaagatatgggatcatgctgcaggggtggttatcattcaggaggctggtggagtggtcacagatgctggtggccgcccattggacttctcaaggggtgtttacctggaaggtttggatcgaggcataatagcttgttccggagcattgcttcatcaaagaattttaaatgctgttgatgcgagctggaactcatcaacactatgaaccaaacaataaggtcttaggagagaatggcctcatgttggtcatagcatggtaaattggaaaactgatttaagtattcattgtggtgctgttgtgactatggggtaacaccgtaacagtgcagcatataagatagtaatagattgtc

SEQ ID NO: 16392 - DNA, 372 bp, Zea mays
  Clone ID: LIB83-011-Q1-E1-A11
cggacgcgtgggggcggcgctctcccgcgcgctcggcgtcttccccgcgctcgccggccgcctcgtcacgctccacgacgacagcatcgtgatacggtgcggcggcgacgacgccgccgtcgagttctaccacgcggtggcgccgtctctgtcgctcggcgacttcctggtgcccggcgccgacgtgccgacccgtttgacgaacggcctgttccccatggaccggacggtgagctacggcggccacggccgcccgctcacggcgttccagctcaccgtgctcggcgacggcgccgtgttcgtcggcttcgtcgccaaccacgccgtcgtggacggcacctccttctgggacttcttcaacacgttggccgg

SEQ ID NO: 16393 - DNA, 339 bp, Zea mays
  Clone ID: LIB83-011-Q1-E1-A12
cgaggacgaggacgacgcctccggcggcggcggcggcgccggggacgaggacctgcagggcgtgccggcggagagctactgcctgtgggcgcccggcgggcagtcgccggcgcccgcgtccccgcgccggtgccggaagagcggctccacgggctccgtcctccgctggcgccgcatcagcgaccgcctcgtcggccgcagccacagcgacggcaaggagaagttcgtgttcctcaccgccgttccggatccgcctcgtcctagtaggagtaacaaggaagtggatgaaggaggcggcgacggcgaggcaggcagcctggcgcatcagatgagatatta

SEQ ID NO: 16394 - DNA, 206 bp, Zea mays
  Clone ID: LIB83-011-Q1-E1-A3
caacgcgtcaggacgcctgcatccatcagacgtccgacgaatcgactactccccttgccccgagcacacgagaaccacggcggccgccggactttacggcggtttcaaagggaagcttggagtctctgattcccccgcgctgcagctcaaccgcatccgtatcacactctcatcatcgaacgtcaagaccttggggatagtttgtg

SEQ ID NO: 16395 - DNA, 380 bp, Zea mays
  Clone ID: LIB83-011-Q1-E1-A4
gaaccaaggtttgcttcagtgtatgggagtcagccattcttctatagaaactgtgttgcggaccactctgaaatatagcttggtctcaaagctaactggagctggtggtggaggctgtgtgttgactctaataccgacgttatcgtccaatattgttctggagaaagtcaccagggagctcgaatctcatggttatcgctgcttcaaagttgaggttggtgggcgaggtctccaagtattccgaggataacataacactcaacctatttcaaggagatgttgtaccatacttttagaagatggcttacctgcactgaagctgtttagattctcttcttgagttattccaagatcatgataggatattcttctcctaagcc

SEQ ID NO: 16396 - DNA, 380 bp, Zea mays
  Clone ID: LIB83-011-Q1-E1-A5
ataatttggaaatgaagaggaaaagaaacgatggtacaaaaggtacagttgttctaaatagcggttctaaagtagagggattgttatgtcttttggaacaggccattcacagtggcagggcacttgttctgagtgaagatgagcttgctgattcagatctggtctatgaaaagtctgttgcttttacaaagtcaattccgcgaagactggtttttgagaatactcgaaggaagtccagtgccaggagaaatgtgccagacaatcatgcaagaactaaaacacatcttgtagaaaataaaatgttgagcagtcctgttgaaaataaatttatcgttaatggaggatctgcaatgcagacaattgaccatgggcaagagttt

SEQ ID NO: 16397 - DNA, 408 bp, Zea mays
  Clone ID: LIB83-011-Q1-E1-A6
cacgccggttactttcactgaggttttagctctggtttatttgatgtccataggttttcttcctttgcttgtgatctcaacacatccatcactatgattcatttgtgtgtgatacatattgcaacttcagttaaaatccaaaaaaaaaaaaaaaaaaaaaaaaaaaaaaaaaaaaaaaaaaaaaaaaaaaaaaaaaaaaaaaaaaaaaaaaaaaaaaaaaaaaaaaaaaaaaaaaaaaaaaaaaaaaaaaaaaagaaaaaaaaaaacaaaaaaaaaaaaaaaaaaaaaaaagggggggccccccaaagggttcaaactttatttaccgggaaagtaaaggctaaaccccttcaaaggggccccaaaagtgaatttaagggggccgcgtttaaaagaccgcggaacggg

SEQ ID NO: 16398 - DNA, 166 bp, Zea mays
  Clone ID: LIB83-011-Q1-E1-A7
gtacgtagtattgcggagatcaatgcaatgcaaactcatcaccaccagattgcattgcattgtacgtagtattgcggagatcaatcgaatcgtttggctcgtcgtcattctatcgatgtacatacattatatatgatgaaagacatatataatcgtttctttcagg

SEQ ID NO: 16399 - DNA, 368 bp, Zea mays
  Clone ID: LIB83-011-Q1-E1-A8
cccacgcgtccgcccacgcgtccgagaggaagaagaagaacccagccaaatcctcagtcttcaggctgctcacagctcgtgccgtccactctcccccgaggcagtctcttgcgttcgctgctcgacatggcgctccaggcggcgacgtcctttctcccctcggccctctccgcgcgcaaggaggggtcggtgaaggactcggcgtcgttcttgggtgttcgtctcgcggcggatggcctcaagctggacaccaccgctctgggcctacgcaccgtgagggtgagcaggtcggcggacatccgcgcgcagacggcagcggtgtcctccccgtcagtgacccccgcgtcgccgtctggcaagaagaccct

SEQ ID NO: 16400 - DNA, 354 bp, Zea mays
  unsure (1)..(354): unsure at all n locations; Clone ID: LIB83-011-Q1-E1-A9
atcacgacagttcttgttggaatgaacgctttggaacaagtggagatttcattgttcattaagctgtactgcataactagcttcgtaatgcttttccccttctttctacaatgatctgctgcagccttgcatgctgacttaagttcatctggtgcagggtgccactccggtggaccagtatctgttaaaagacccatggagaggggcgaagcactgataaccccaacacctttgctcttcaagtaggggagcagatcaacaatggaggtgtcattgatcccgtantgacaataagatagaatcacgtccatcgagcctggtgctacaaggtccaggacataaaggtagatgctg

SEQ ID NO: 16401 - DNA, 240 bp, Zea mays
  Clone ID: LIB83-011-Q1-E1-B1
gaagagggtatgaaaaatgctttacaatgtggagcagaaaatgattaagaagatgccgacggaaaaccggctttacattttgcatgtggctatgttgaagtgtgcataaaatctccttgaggcgggggccacaattgatgccctagataagaacatgaacactgcgttgcacgatgctgctgggtatggtcggaaggaatgtgtggatcatctgttgaactatggtgctgcagtcacgct

SEQ ID NO: 16402 - DNA, 184 bp, Zea mays
  Clone ID: LIB83-011-Q1-E1-B10
cggacgcgtgggtattggctatgtataatcctatagcgcttgaaaactgagcagtttttcctatggtgccatcataggatttgcttttacagttccaattatggtgtagttcaaaaattgctcgactaaactgcggtgtaacagttaaatgggcagatggaataatgtaatcatactgttccct

SEQ ID NO: 16403 - DNA, 354 bp, Zea mays
  Clone ID: LIB83-011-Q1-E1-B12
gaaaaaaaaagtaacatgatactacaaattccagaaacagctcctgtaaatccacatagtacttctaattctacgatggcagcaaatttatttgaaattggtcatcaccatccttaaaacagttgagtcacatgccgcactaccacagttcgtgaacattacacacaatccctcgcctcacaaacagaagcatttatctttggcaatatgcggcggggagtcatggactgagaaacgtatcagcacaatatacttcacggcagaacctttcatgcttcagcagccttctgtgaagggctgtcttcacccttctgccccatctttgacttcttggcttcgtagtcttttacagca

SEQ ID NO: 16404 - DNA, 368 bp, Zea mays
  Clone ID: LIB83-011-Q1-E1-B2
gtcaccaactgggcgctcgtgtccatgaaccacgacacgcagtcgtgcatggaccccaacgtcatggaggccaaggtggtggtcagctcctgcggccacgacgggcccttcggcgccaccggcgtcaagaggctccaggacatcggcatgatcagcgccgtgcccgggatgaaggcgctcgacatgaacgccgccgaggacgagatcgtgcgcctcacgcgcgaggtcgtgcccggcatgatcgtcaccgggatggaggtcgcagagatcgacggcgccccgaggatgggcccgacgttcggcgccatgatgatctccggccagaaggcggcgcacctggcgctgaaggcactgggcaggcccaacgc

SEQ ID NO: 16405 - DNA, 370 bp, Zea mays
  Clone ID: LIB83-011-Q1-E1-B3
cgaaggggctcatcccggactccgtcgcctcctacagcttcgacgaggccacgggcgccttcgagatccacctcgccggcacctgctacgtccacttcggctcccacctcgtctactacgagaggaccataaccggcaagctctccaagggcgccatctcggacctctccggcgtccaggccaagaagctcttcctctgggtctacgtcacggggatggtcgcgcaccccgaccagggcaccatcgagttccaggccggcttcatctcggagtcgctatcggcctcgatgtttgacgaggtgcccacctgcggttccagcgttggcgcgcagctgcgcggcgcggctggggtgatcggcgagcttgggct

SEQ ID NO: 16406 - DNA, 384 bp, Zea mays
  Clone ID: LIB83-011-Q1-E1-B4
cccacgcgtccggcaaccggtccaacactttcacgctcaggcgctcagctctagcaatggctgcctccaccatggcgatctcctccacggcgatggccggtacccccatcaaggtgggctccttcggcgagggccgcatcaccatgcgcaagaccgtgggcaagcccaaggtggcggcgtccggcagcccctggtacggccccgaccgcgtcaagtacctcggccccttctccggcgagcccccgagctacctcaccggcgagttccccggcgactacggctgggacaccgccgggctgtccgccgaccccgagaccttcgccaagaaccgcgagctggaggtgatccactcccgctgggccatgctcggcgcgctcggctgcg

SEQ ID NO: 16407 - DNA, 367 bp, Zea mays
  Clone ID: LIB83-011-Q1-E1-B5
atcaaacgtgcacatgaggattctctgcaaggttcaaaggagttctgcatagaaatacaattgctgtcaagattacatcatcgcaatttggtttctcttgttggctattgtgatgaagaagacgagcagatgctggtttatgagttcatgcccaatggtagcctacgtgatcatctttctgctaagactgaaagacctctgagctttgggcagagggtccatattgcacttggagctgcgaaaggacttctatatctacataccgagggaaatcctcctatatttcatcgtgatgttaacgccagcaatagtcttctagattccaagtttgtagcagaggtggctgactttggtctttcaaagcttg

SEQ ID NO: 16408 - DNA, 375 bp, Zea mays
  Clone ID: LIB83-011-Q1-E1-B6
gtccgacgcgccactgtttgcgctgtgcttaaggtcctactcaccggtcttctcgtcgacagtgccagtcgtgtctcccgctacgctgacactttttctccatcgctcgactccatgctcagcgctctcaccatcaccgcgcctctcttcgccggtgttcgccgggcatacgctcaacctcgccaccgtgggacttacctcgccttcaaaccgtgttcgccgcagcccagccatcgtctacctctacgctcagtacgaaaccgctcgccctacagcctcgtcgcgtcaccattctgcaggcactgagctccacccacctcggtgaatgccaccgtcccctttttcactgtgcactcgggatcagcttcctggtgc

SEQ ID NO: 16409 - DNA, 400 bp, Zea mays
  Clone ID: LIB83-011-Q1-E1-B7
gtctggtcccccacccctcagcgcgacgaaggtaagatgttcctgcggaggatcctgaccggcgggggcggcctggcggccctgagggcggcgcgcgccgtgaaggagacgacggggatcgtgggccttgaggtggtgcctaacgcgcgagaggttctggtagggctctacgagcgcacgctcaaagagatcaaggccgtccccgaagacgagggttaccgcaaggccgttgaatccttcaccggtcaccgcctccagatctgccaggaggaggaggactggaagcgcatcgaggaccgaatcggatgcgggcaggtcgaggagctcatcgaggaggccgaggacgagctcaagctcatcgctaaaatgattgaatgggatccatggggtgttcccgatg

SEQ ID NO: 16410 - DNA, 403 bp, Zea mays
  Clone ID: LIB83-011-Q1-E1-B8
cggacgcgtgggcggacgcgtgggcggacgcgtgggtttttttttttttttttttgcctttgggcatctttctcctcatcaatatataagacagatctcctgtctgattgtttcaaaaaagtttaatctaaaaacttaagttgatgaaaaaagtgggcaatttccctgtactgtgtactccagcatctacgagcccggattctagtaattcagataagggcgcgggcggtggcggtggcgctggcggcgagcctggacgagccgtagagggtctcctcgaaccggatgatctcgttcttggacccgtaggccacctgggtccgctcgtcgagctcgttgatcaccctgtccagcaccgactgcttgccgtcgctgctgtacccgccggccttctccatcaaga

SEQ ID NO: 16411 - DNA, 359 bp, Zea mays
  Clone ID: LIB83-011-Q1-E1-B9
cccacgcgtccgcgctgcttctctctccctctgctcgctctccccagccgaagcgcccttcttccctggtctcccatggcgtcggtcgctcctccctgagctcgcccctgcgcgctctgctctcttccccacggcgcgccctctccctcttgtttctctgctggccgccgctcctgctcgttcttctggcagccgcgcgcagccagcttctcctccagtcgcgcctgctgcccgctcggcacccatctccctgcggccactctcctttgacacgcgcctgctcccttcgccgcgcgctcctcagctccgcccggtgctcctccatggggctcggcttcttcctcctaaagtcccttcgt

SEQ ID NO: 16412 - DNA, 405 bp, Zea mays
  Clone ID: LIB83-011-Q1-E1-C10
ccttcgccttgcgagggggcggaggggaggtggtagtggtagggtatacaggagtgctctgcccatggagaaggcggggcaacaacgccatgttatcggcggcggcggcaagaaggcgcccgcgctggggctgcagaagcagaactcgtggtcgccggacatcgagcgcgacgaggcgtgggagcgccgggcgcagggcatgcgccgccggggcacggcgctgcgccgcgcccgcagcgtcacggacgacgacctcgacgagctccgcggctgcatcgacctgggcttcggcttcgagccggcgcccgccgccgcgtgcgcctgcgcctgcgccgggaggaaccgcctcctggagacgctgccgcgctcgaactccaaaaaaccgttcaaagggggggcgcggag

SEQ ID NO: 16413 - DNA, 341 bp, Zea mays
  Clone ID: LIB83-011-Q1-E1-C11
gcttctcctccccctcttatcaagtcctcctcgggttagggttccttagggttttgtggaggggcgatggcggcggctgatgtggagtaccgttgcttcgtcggcggacttgcctgggccaccagcaacgagtcgctggagaatgccttcgcctcctacggcgagatcctcgactccaaggtcatcaccgaccgggagacggggaggtcccgcggcttcggcttcgttaccttctcctccgagaactccatgctcgacgctatcgagaacatgaacggcaaggagctcgacggccgtaacatcaccgttaaccaggcccagtcccgtggcggccgcggcgg

SEQ ID NO: 16414 - DNA, 379 bp, Zea mays
  Clone ID: LIB83-011-Q1-E1-C2
cggacgcgtgggcggacgcgtgggcggacgcgtgggagcgagaaaagaatctctgaccggagtcctgccaggctgatagaatcctggcagccatggatatactgctaggttctgggagattcttggcgcgacggactcccctcatgctcgtccctcgctgctctcgaggctcccgggacagaagcggcagcgacaaaggtgaaacctctgctgactgggacaaggcatgggctaagttcaagaagaaagggaagaggaccctcttttctgatttctcaccagacaagtatgtgacctggaacccacggcgcagcgagtatccgttgtcagaagaggttgatccaatcaagagaactgaaagatctaacttgatgctttg

SEQ ID NO: 16415 - DNA, 385 bp, Zea mays
  unsure (1)..(385): unsure at all n locations; Clone ID: LIB83-011-Q1-E1-C4
ggaggtggtagacctcaagggggagcttttcctgctccgccttaagcgctcggcgcgccaggagttcaagaacagcgagttcagccgcatgcgcaagaggattgctcgtatgctaaccgtgaaaagagagcgggaaattgaacaaggaatcaataaaagattgtctaggaagcttgataggaaatggaagcagagcattgtggtcagaccaccaccatctctaagggggaacaaagaggagtagaaagccgcaaaaagagggcaatgtgcaaaagtcgtttcatgcgagtgttgcaggaaggtcncttcatgatttcaacccttattgcgttgttatgtattccatgtttacattttgctaagcattgctatctgaatctgaatt

SEQ ID NO: 16416 - DNA, 397 bp, Zea mays
  Clone ID: LIB83-011-Q1-E1-C5
aaagaacttgggctctatgccaatgtcagaccttgcaacagcctcccaggttacaagaccagatacgatgatgttaaccttgtaacaattcgtgaaaatactgaaggagaatatagtggtcttgagcatcaggttgtgagaggtgttgtggaaagtttgaaaattattacacgccaagcaagtttgagagtggcagagtatgctttccattatgccaaggccaatggccgggaaagagtctctgcgatccacaaagccaatattatgaggaagacagatggtcttttcctcaagtgttgccgtgaagtgtctgaaaagtaccctgaaattcaatacgaggaggtcatcattgacaattgctgtatgacgcttgtgaagaatcctggtctttttgacg

SEQ ID NO: 16417 - DNA, 379 bp, Zea mays
  Clone ID: LIB83-011-Q1-E1-C6
cccacgcgtccgcccacgcgtccgcacgcccgcagcgcctcgcctcggctgctctacctctatcccgcgacccgcgagatcggaatcgcggcgccccgccgccctcctccaaaatggcaccgtctctgctcggggggttcaccaagtcgttggccatgacggtgctctccgagatcggggacaagaccttcttcgccgccgcgattctggctatgcgccatcccaggaaactcgtattggcaggctgtttaactgcactaatagtcatgacagctctatcggcttctctaggttgggttgcaccaaatctgatttcacgtagatggactcatcatttgagcagtctactgttctttctatttggcatttggtcaatgtg

SEQ ID NO: 16418 - DNA, 361 bp, Zea mays
  Clone ID: LIB83-011-Q1-E1-C7
agcaaaaaagctgacagagagtaaatcaatgcaatcgatgtgtgaaacctatgcagctgtgtcatatatttgtaagggtgatgcagagtcgtcttcacaggcactagaactggttggtcctgcctatagaacaatggactcatttgttggtgtgcgagagaaaacctgtatcatttttgtttatggactattacttatgagacagcataatccgcaggaagcacggaaccgccttgcaagtggtttgaaaatagcgcaccaacagttgggtaacatccagttagtttctcagtatttgacaatactgggcacattggcgcttcagctacatgacgcagcacaggctaaagagattctgaaa

SEQ ID NO: 16419 - DNA, 392 bp, Zea mays
  Clone ID: LIB83-011-Q1-E1-C8
ggatttatgaagcggttacaacaaatactaggacggaaacatcagcgcaaccttcatgcaatttatgtactccacccaacgttgggtttgagaacagttgttttggcaatgcaaatgtttgtagatggagaggtctggaagaaagttgtatatgtggataggcttgtgcagctgttcagatatgtaccacgcgagcaacttacaattcctgactttgtttttcagcacgatctggaggtgaatggtgggaggggcctaattgtagacccaagaacaaagcacatataccagaggacgtccagttgatatatgccagttctgaggcctgaagtttgttagttcttgcactgtaccattctaatgttcacttgtaatttattccacgtgttcat

SEQ ID NO: 16420 - DNA, 255 bp, Zea mays
  Clone ID: LIB83-011-Q1-E1-C9
cccacgcgtccgccgcatgcggcgtgaacggaagaaggcgagagcggagggcgccgctgagcctcagttggtactagctgctgttgatgaaaactctgaggtcagcgcggactgctgataagtttcctgtgtggtgtttctctttttcacagcccttgttacactttttcttccttaattgtaagaccacatgatctataaaggtcatatttacatgtgttgtttagataaatggatatgttctacttgtacgtt

SEQ ID NO: 16421 - DNA, 373 bp, Zea mays
  Clone ID: LIB83-011-Q1-E1-D1
aaacaaaccagcagctgcttgcttcaaaggatgaagaaaagaagatacttgtgacattaacacaagctctagattcccaagccaaggagttaaaatccttgaccgagtcaatcaatcgtaccagggaacccataaacattaccagagacgataggttttctcagcaccgcccactggaagaccatgtccctcctgttacgaagaatggggcaattaacagttcatggagatcttctcagcaaactaacatgtatggtgtgtcacatggtgactttggttccgcaaggtctgcttcattcgtgccagcacctgctgaacctacagctggatcattttcaagatcttatgccgagacgtccaccgctgcacaacg

SEQ ID NO: 16422 - DNA, 163 bp, Zea mays
  Clone ID: LIB83-011-Q1-E1-D10
gatcgatcgatggatcgatgattccatgtacatatttgttagggggatgctgcggctaggctattagctgcaggctatagagtttgagggtgatatacttatcagtttgctgcctgtaagactggttttggttttgctataatcgtgatatattccgatgtac

SEQ ID NO: 16423 - DNA, 348 bp, Zea mays
  Clone ID: LIB83-011-Q1-E1-D11
cggacgcgtgggcggacgcgtgggattcgtgattgggttcttggaacacctgagggtacatttgtttccatgggtgtgtactctgatggttcatacggtgttccttctggactcatttattcattcccagtaacatgcagtggtggtgaatggaaaatcgttcaaggcctcccgattgatgagttctcaaggaagaagatggatgccactgcccaagagctgacggaggagaagacgcttgcttactcatgcctcgagtaaattctaccacacccagagagcaattgccaccccaatgttttgaataaaaaaagaaactccaactcgattcatagattctcactcaga

SEQ ID NO: 16424 - DNA, 344 bp, Zea mays
  Clone ID: LIB83-011-Q1-E1-D12
caacgaagtgcgagcgacccacgtccacacgacacgaaccaccaccaccaaccagcagccgcaccacgcacccagcgcaaagcgatggcgtcgctcaccatgatggcgtccttcgccgccgtggcggtggccgcgccctcgcgccgcggcaccttcgccgtggtcaggtccgccaaggtcgaccgctgccaggagcccgccacgctagcagcaaccgaggccaggcccgccgccgacggacgccgcgccgtcatgctcgcggctgctgcggcggccgtggcagccatcggcggcgccggcgccgccatggcgggccccaagaacgggacccccgaggcgaagaa

SEQ ID NO: 16425 - DNA, 347 bp, Zea mays
  unsure (1)..(347): unsure at all n locations; Clone ID: LIB83-011-Q1-E1-D2
cggacgcgtgggcgcgagtgagtgaacaccagccgtattgtcccgactcctgacccctaccgatcctcgcctgctgcagccatggcgacctccgcggcgctctccaccgccgccaatcccacccagctctaccggtcccgcgcttcgctgggcaagccggtgaaggggcttggcctgagcatgggccgcgagcgcgcccagcggagcattgtgtgccaggcggcgagcagcatctccgccgaccgcgtccccgacatggagaagcggaagctgatgaacctcctcctcctcggcgccatctcgttgcccaccgtcggcatggtcgtcncctacggcgccttcttcgt

SEQ ID NO: 16426 - DNA, 364 bp, Zea mays
  Clone ID: LIB83-011-Q1-E1-D3
gtacatacatactaggcagccaggcagccatggcgcccaccgtgatgatggcctcgtcggccaccgccgtcgctccgttccaggggctcaagtccaccgccagcctccccgtcgcccgccgctcctccagaagcctcggcaacgtcagcaacggcggaaggatccggtgcatgcaggtgtggccggcctacggcaacaagaagttcgagacgctgtcgtacctgccgccgctgtcgacggacgacctgctgaagcatgtggactacctgctgcgcaacggctggataccctgcctcgagttcagcaaggtcggcttcgtgtaccgcgagaactccacctccccgtgctactacgacggccgcta

SEQ ID NO: 16427 - DNA, 160 bp, Zea mays
  Clone ID: LIB83-011-Q1-E1-D4
cgccgctcttccacccccaccacccacctctccccggcctcgcacccatggccacggctttgatggttgcagccaccacctcctgctccccgggccgcgccgcgccgcgcctgaagccggtggcctcctcctcctccagcagcagcagcagcagctcggc

SEQ ID NO: 16428 - DNA, 383 bp, Zea mays
  Clone ID: LIB83-011-Q1-E1-D6
cttgttgcagtccgcacagctttggtagccttgattgccttcatgccgacgaacccaggtggggcattgggctcactggattacaaaccagaagacagacgagcacttgctataaaatcacgtgaggtgccgccgaaatttggctccccacaacgtcagaaactaattgatgagatccatgagcaaatgctcagtaaggctcctcctatcccccaaacgctgccaaatgtgccaaacgaggagctcgcacctgactcttgtgatgagcatgcagacaaggtagatgaaggtggcaacacatccaagtccatgtcaggctcgtcgagtggccatcctgtgcctgaagctgaatcgctggctgcagaaaacacgggtgaagcatc

SEQ ID NO: 16429 - DNA, 382 bp, Zea mays
  Clone ID: LIB83-011-Q1-E1-D7
gagtgccccttcgtgcaccccggcgagaacgcgcgccgccgcaacgcgcgccgcttcacctacagctgcgtcccctgcccggagttccgcaagggcagcgcctgccgcaagggcgacaactgcaaatacgcgcacggcgtcttcgagtgctggctccacccggcgcagtaccggacgcgcctctgcaacgacgaggtctgctgcgcgcgccgcatctgcttcttcgcgcacaagcccgatgagctgcgcgccgtcaacccgtccgcggtctccgtcaggatgcatcccaccgtttcgtcgacgcgctcctcgccgcccaacggactcgacatgggcgccatgctcaacccgggctggtgctcctcaccggccagcacgctca

SEQ ID NO: 16430 - DNA, 395 bp, Zea mays
  unsure (1)..(395): unsure at all n locations; Clone ID: LIB83-011-Q1-E1-D8
cccacgcgtccgcggacgcgtggccatgatggcggaggttctaataagtaaccttatgattggaaattgcagtgataggttgtgtgtacgtgtctcccgtctgtgaaaattttatgatcccgaggatgagtataagcttttccatgctcatatggtcctcatcgacgaggaggtacgcgacctgcttactacatgaagcaagctgcataccagatcaaagaaattttaatatggggctggcagtgctcatgctcaaatataccctccactcactgacgttttcaaacctctgataaaggagggcaatgtctacaatgtctcctacattcagatcaaganagctaatgggatgtacaagcctgttgacaacgatatcatgatcggtttcacaaaat

SEQ ID NO: 16431 - DNA, 367 bp, Zea mays
  Clone ID: LIB83-011-Q1-E1-D9
cccacgcgtccgcccacgcgtccgcccacgcgtccgcgctccatagatttcgccgcaaggggcaacggcacacccaccaactgacctgacccacgagggatccgcagatgaagatcattccggtcccttgcctggatgacaactatgcctacttgtacgaatcagcccgcaccgcttgttttcactactctttcagttgttcgtttcaaatcgttgaattcttgattgctatttgtttcttccgttcgaagaatcgtggacgagagcaccaagaaggcagcggccgttgaccctgtggaaccggagaaggttctcaaggcggccggcgaggtcggcgcctacgtcgactgcgttctcaccacccatc

SEQ ID NO: 16432 - DNA, 374 bp, Zea mays
  Clone ID: LIB83-011-Q1-E1-E1
cggacgcgtgggttcaacttcaaatccttgcattttgaagttttctgactcttgaggatggaggctattcttgaaagaccgaagtacgagtgcttgctgtttgatcttgatgacactctgtaccccttcagtgctggcatcaatctagcttgtcgcaaaaacatacaagattacatgcggcaccacctgcatattgaagaaagccaagttgcagacatgtgcctggacctgtacaaggaatatggcaccacaatggctggccttaaggcattaggctacgaatttgacaacgatgagttccatgcaactgttcatggtaccttgccatatcacaacctgaggcctgaccctgttttgaggaccctcctactttc

SEQ ID NO: 16433 - DNA, 368 bp, Zea mays
  Clone ID: LIB83-011-Q1-E1-E10
cggacgcgtgggcggacgcgtgggggcaaaggaatcccaatcaggcaagcaaaaggaagaaccagctgctgcggccggagatgtcgtcgcagctgatcgaggagcaccggtcgggcgcggaggtgcacgtcgggcacgagctgtgcgagcgcaagtcgcgcgagttcatggtggagctgggcctccccgacgggctcctcccgctgcccagcctggacgaggtgggctacaaccggtcgacggggttcgtgtggctgcggcaggccgccggcctgacccacaccttcggctccatcggcaagcaggtgtggtacgacagggaggtgacggcgttcgtggagcccgggcggatgcacggcctcgccggg

SEQ ID NO: 16434 - DNA, 330 bp, Zea mays
  Clone ID: LIB83-011-Q1-E1-E11
cccacgcgtccgcccacgcgtgcgcccacgcgtccgcccacgcgtccgcaccaccaccccgccggccacactcgtctttctcacgagccacaggcacaggcaggctctcgagctcagtccacccagcgcaggggatggcgtcgtcgttcgccgtggcaacggtcccgtcgctggcggccccggcggccaagaagcggtccggcggcgtcacgtacgtggagggcatgaacgcctacagcggcctcaaggggctcaacaaggtgaacatgctcggggtgcgcaagaccgccgactactccttcgccaaggtcgtggcgtcgctcagccccg

SEQ ID NO: 16435 - DNA, 103 bp, Zea mays
  Clone ID: LIB83-011-Q1-E1-E2
cgtccgcacacgcgtacgctgacgcgtgggcggtcgcgttggcagacgcgttgactgatgagtgggtttgggatgggaaacagcacagataaggaggatgcgt

SEQ ID NO: 16436 - DNA, 369 bp, Zea mays
  Clone ID: LIB83-011-Q1-E1-E4
cccacgcgtccgccaccattcatctacgaatccatgggaggagattggagtggggccagctaacggatcggagtcggagtccttcttgtgcttctcctgctctgctggtgccgctgccatgggtttccccagcacccccaacctgaagctggagcctcgccctcgcacgcggaggctcctgcgctgcgccctcagctctgagcctgtgcagcctcccatgactgtttccatcactggagccacaggtttcattggacgcagattggttcacaagcttctatcggatgatcacaaggtttgcatcttaacaaggtctgcctccaaggctgcgtcagtttttcctgcttccacctatcctggactcacaat

SEQ ID NO: 16437 - DNA, 399 bp, Zea mays
  Clone ID: LIB83-011-Q1-E1-E5
gtatccagatgatgcaacagatcataaaagagtcggctggggttgagtacctgcagaaggcttttgctgatcgctatggacctcctgagacagcaccagcttctcttcccctaactctgcaatggattttgacatcgaagaacattgcggaagaagaatggagtgaacattcagactgtctttcagtaatgccagcagcagggcaggctcctgctcttgttccggtactccgatctggtcatggagctccagtagggcaaccatctccttctgcaggagacacctctggtcaaccagagtgcaagggtgagaagcttgacaagctaataaaggatggcctgttgcaactcattagtagtgtggagggcttgcaattgcagtcaactcctgaaagttttc

SEQ ID NO: 16438 - DNA, 382 bp, Zea mays
  Clone ID: LIB83-011-Q1-E1-E7
gcccgctgctcggtgggcccctggcaggcttcgtgtacgagtcgctgtttctggtgcagaagatgcacgagccgctgctcaatggggaaatctgacgaccatcaccaccttcatgcttgtttctgtaaaacaggtcattctctgcaagcatggtacatacattggccaaggtaattagagaggcttgctgtaaagcagtaggattgctggctgtagaaattgttgatgggcttttttggggggtttcctgccaaggaattctttcttttatataatctcaaaaaagttttttttttggtatgggctgggttctatcaagggtttgttaagtctattagtttaccatgtagcagaaaaactagtgggacgtgaagttttttca

SEQ ID NO: 16439 - DNA, 392 bp, Zea mays
  Clone ID: LIB83-011-Q1-E1-E8
agcagctgttgcaaccggttccttcgaggagaacgtgagaaagaagcatgaggccccaggtgctgctcgtcgcactggccgtcttcgccgtcctcgtagctctgccactgggcaaagcgcacgaggaggaggaggaggaagggcttgaactcgaagccagcatgaggcggtggccgtgctgcgaccagtgcggcatttgcaccaggtcgcagccgccgatatgcgagtgcacggacacgtcgacgaccggctgccagccggcttgcaaggcgtgcgccctgtccatctccgacggcctcttcgtgtgcaaggacaagatcgtcaacgtctgcaagcgccgctgcacacgtcgtactgatgatgatgatacgtgacttataatctaagtgggc

SEQ ID NO: 16440 - DNA, 343 bp, Zea mays
  Clone ID: LIB83-011-Q1-E1-E9
ggaaggagagaccacgtaccgtctgcgaggaggacgacgaagaaggagaagaggctgattcgatcgagcagcatggcgcggcggccacggccgtgtgcccacctgacggccacgctccttctgctcgccgtcgccgcggcggtcgccagagccgccgacggcgacgagaagtgcggcagcccgtgcgggaacccctgcggcgagccgtgcgtgtacgcgagcccgccgccgccgccggtctactacccgccgccgccgccgcccgtgtactcgccaccaccggcgccggagtactacccgccggcgatcccgaccccgaccacgccctactgcacgccgccgc

SEQ ID NO: 16441 - DNA, 371 bp, Zea mays
  unsure (1)..(371): unsure at all n locations; Clone ID: LIB83-011-Q1-E1-F1
ccgaaccgctgacgagcgctgcgccttctacgaggacgaggtcgaggagctccgggacatcgtgctcgtgcgggagcgtgaggtgcgcgcgctgcgcaaggaggttgacgcctaccgacgcctgctcggttttagcgctaccgaggaggacgaggaggaggatgacgagcaggagatggtcacgccgcatagtttccccatgtacgaaggagagcccagctcgtccaaatcggtcgatgcgaatcggatgcaacattttgggaatgattctgggttcagcttcaagacgccatcaccgcgtgaacaaccaacggtgccgcctcttactgcanggcaaatcaatgtgggaagcgatgattgtgttgctgttc

SEQ ID NO: 16442 - DNA, 425 bp, Zea mays
  Clone ID: LIB83-011-Q1-E1-F10
cccacgcgtccgcggacgcgtgggcgctcggtcactcctcattcctcagtcctcactaacaatccgcaccaggactcatcagggccgcgcgcgcgcgccggcagcgatgcggtgggacgcagccgaggccgaggcggccctcgagcggatctgggacctccacgaccgcctcagcgatgccatcctcgccgtctcccgcgcgcacctcctcctgcccgctcccccgccccctcccgtgccgtccgcgccctccgccaaaggggcccaccgcgtcggcgtcggcaggaacgggtgcgtcttcgtcaagggcggcgccgccggcggcggagggcaagcgctgaccgccgccgcggaagccctggccgagggcaagagcctaaaagccaattccttccggcctcaaggacttcgaggaccacctcgag

SEQ ID NO: 16443 - DNA, 333 bp, Zea mays
  Clone ID: LIB83-011-Q1-E1-F11
gacgcgtgggcggcaccgacgacggtgccggcgcaaagagcggcggtggtgccgcgccagagatgtccacggcggagcggcaggagatgcagatgaagaagagcaagcttctcaacatgcttgacgaggtggagcagcggtaccggcagtaccacgggcagatgcaggcggtgtcgtcgtcgttcgaggcggcggcgggggccgggtcggcgcggacgtacacggcgctggcgctgcgcaccatctcgcggcagttccggtgtctgcgggacgcgatcgcgtcgcaggtgcgcgcggcgagccgggcgctgggccaggacgcggacgccgccg

SEQ ID NO: 16444 - DNA, 388 bp, Zea mays
  Clone ID: LIB83-011-Q1-E1-F12
agcttctgttgttaaatgctctgagctgccacaggtttctctcagagagaaggcctcaaaggtcttgaatatgctgattggggaagagcctactggaaccacagcaacaaaatctgcaatggccacacctgttcagatgcctgatttgatcgatacaggtgatcaagatggtctggcaacaagttctggacaggaaagcaatggacaaaaaaatactgggaaagcatatgtttcttcagttgatgatttgcttggtggtgaacctattgctgatacaagtgtcactgctgatagcaatggaagcgatccatttgcagatgtatcgttccatgaggtagaggctaaggagactaatgatctcttctcaggattgatagtagaagaaaaa

SEQ ID NO: 16445 - DNA, 377 bp, Zea mays
  Clone ID: LIB83-011-Q1-E1-F2
gtttagcctccaagcaggggcgccgcgcggggtattctgtccgtcgttgagggtagagagtcacttgcaccgggggagcggagatgaagccggttgtggggatcgtggtgtcgaacaagatgcagaagtcggtggtggttgcagtggaccgtctcttccacaacaaggtatacaaccgctacgtcaagcgcacctccaagttcatggcacacgacgatgacgactcctgcaacattggcgaccgggttaggctggatccttctaggcccttgagcagacacaagcactgggttgttgctgaaattctccgcagagctaaggtgtacgttccaccagctgcaacagcgtccagtgaacgtggtagcaaatctcaacaa

SEQ ID NO: 16446 - DNA, 359 bp, Zea mays
  unsure (1)..(359): unsure at all n locations; Clone ID: LIB83-011-Q1-E1-F3
cggacgcgtgggcggacgcgtgggcggacgcgtgggcggacgcgtgggcggacgcgtgggcggacgcgtgggagagaccataactctgagcagaggccagaagagcggtctaatcagagagctctgaagtctggtcttgcttaccttgttcgtagtggtgggccgaaggatacaggtgcagcaacagagatcaggaatctgaccagacggaagagaaggatccangaggttggagggctcccaactcctgtttacacgtcggatacggatgcttggaggcaagttagcgctgtagttctttttggaacgaagggacagaaaaggccgagaggagatgaaccgtaggagttgccgccttt

SEQ ID NO: 16447 - DNA, 380 bp, Zea mays
  Clone ID: LIB83-011-Q1-E1-F4
gccgtgtaataatggggaacgtagaaatagttcaccctggatctaagcagtgccaacctagtaataagtattttgatagtggagtagacgaccttaaaaatccacggcattacgttgtgtgggatatgaatctgaatagtcatatctattctgagtttgtagtcactgtcaaattgccttctaaaaccaaagattcctttgtatcgcaagaaaactgtcagaattcgtctgatctatcactggtgttgaactctagttcacctgattgtatttcacagaagagttccactgttggagcagcaagagtgcagtaattcagattctgtgatttgactcaataattgacatgattgcattattgagattataacttggagctg

SEQ ID NO: 16448 - DNA, 382 bp, Zea mays
  Clone ID: LIB83-011-Q1-E1-F6
cccacgcgtccgcggacgcgtgggcggacgcgtgggcggacgcgtgggccccgacgacggcgcgcacgggctgtaccggctgtggacgtgccaggactgcgcgggcgacctgggcgagtttcccggcgacgaggctgccgcggccgacggcccttcggccgcgcgcgcggcccgctcgccgacgacgctgtcgcacgtcgtgttcggcatcggcgcgtcggcgcggacgtgggaccagcgccgcgggtacgcggagctgtggtggcgccccggccagatgcgcgggcacgtctggctcgaggagcagcccgcgagcccgtggcccgcggcgacgtgcccgccgtaccgcgtctcggcggacgcgtcccggttcggggaccgc

SEQ ID NO: 16449 - DNA, 385 bp, Zea mays
  Clone ID: LIB83-011-Q1-E1-F7
gcgcgctctctctctggttcccgtgtgcaggagggccgtgcacgcctcggcgtacgacaagaacctggaggaccaggtgcgcccggcgttcgtgccggacgatgtgatcggcagcgccgggagccccgacaagtactggagcccccaccccaagaccggcgtgttcggcccggcggcggtggaccccaagctggcagctggtggcgcgccggacgccggcgcggatgctgcaggaggcacggtgctggaccagaaggtgtggttccgcccgctcgaggacgtcgagaagccgccccccgccgcgtgagccgcgcggcgctgctagcccagcccacactgctgctcgctcataaaaagggcggcgggagagcctggcaggcactct

SEQ ID NO: 16450 - DNA, 387 bp, Zea mays
  Clone ID: LIB83-011-Q1-E1-F8
cccacacgcacggccgcaggcagcagcaccatgtggtcggcagcaacggcggcggcggcgcgcgcggtgtccgtgtccccagtcccggcgccttcgctcctcagcggccggcgcggcgggtcgcggggcggccgggggtcggtgtcggtgcgcagcacggtgtgggacttcgtgggcggcgacctggtgcggccggacctgggcaagtggctggacgacgtggagaagcacaaggcgctggccatctacccgccgcacgagggcggctacgagggccgctacctgaaccgcctccgttaccagggctactacttcctcgacctctccgcgcgggggctcggcgacccggagaccacgctcaccaaggtccaccccgtctgcccgcct

SEQ ID NO: 16451 - DNA, 345 bp, Zea mays
  unsure (1)..(345): unsure at all n locations; Clone ID: LIB83-011-Q1-E1-F9
cgcatctgcttccagagccccccgccgccgctgcgccctcctctcggtcctgccgtccgtcgaggtaaaaggacagcatggtgagggtcagcgtgctcaatgatgctctcaagtccatgtacaatgctgaaaagatagggaaacgtcaggtcatgatcaggccgtcatccaaggtgatcatcaagttcctgacggtcatgcagcgccatggttacattggcgagttcgagtacgtggatgaccacagagctgggaagatcgtggtggagctgaatggaagactgaataaatgtggtgttattagcccacgttttgatgtangtgttaaggagatcgagggatgga

SEQ ID NO: 16452 - DNA, 87 bp, Zea mays
  Clone ID: LIB83-011-Q1-E1-G1
ggctaaagcccgtaggaatttgcgtattggtaacaagacgatatgatggtgtacctgttgattatgtcaggatctattgacagcttt

SEQ ID NO: 16453 - DNA, 174 bp, Zea mays
  Clone ID: LIB83-011-Q1-E1-G10
gggcatatacatacttgtatgcgtgtaccgtagacatacgtattcgtatatgtactgcaggagatgtaccagtatttgtgaagaagggagcatgggctcagagattgtaccagtagtgtacgtatttgcatgcatgctttggtccttgtggacattatcaatgaaatatgctgt

SEQ ID NO: 16454 - DNA, 361 bp, Zea mays
  Clone ID: LIB83-011-Q1-E1-G12
aggagcttcactgacacttgcttttgctgagaatggagacctgtttgctgatgtctggtagattgggttgaaatgcttggagggatggtgctcggctatgggagttgaagtccgtgagttgctctggaagctgctcggtgtctgggggtacaactcgatgtcatctgcacttgctcggcttggtggataaggaggcttgtactgcgaattcccgcaagaccgagggtacctatggtgtccggtatcagcacttatgacactgtttctgctactgaggctatcactgtctgcctcatactggttgcgggtattgatcggtttcagcacggacgaagaggctctggctttcgctgctgctttc

SEQ ID NO: 16455 - DNA, 334 bp, Zea mays
  Clone ID: LIB83-011-Q1-E1-G2
cccacgcgtccggttccccgaccacaccgttcctccgagcccaggatcagccccgcgccaggaggaagtttgttcttttaacaatatgtcgagggaggagaatgtttacatggccaagttggctgagcaggctgaaaggtatgaggagatggttgagtatatggagaaggtggctaagactgtagatgtggaagagctcactgttgaggagcgtaaccttctgtctgttgcatacaagaatgtgattggggctctccgcgcttcatggcgcattgtttcttccattgaacaaaaggaggagtcccgtaagaacgaagagcatgtgaaccttatc

SEQ ID NO: 16456 - DNA, 89 bp, Zea mays
  Clone ID: LIB83-011-Q1-E1-G3
gctgtatatgcatgctagtatgcattgtccctctcttgtcaatgcttgtaatcgaactttattatgaaaaccaaaacgagaatccaacc

SEQ ID NO: 16457 - DNA, 377 bp, Zea mays
  unsure (1)..(377): unsure at all n locations; Clone ID: LIB83-011-Q1-E1-G5
gccaagggtgtcggtgtggctgtgtcggccacggccagctagagctgtgacctgggagtgggagggttggtgcctataggatcgtcatggacaccatcgaggagtgcggcgacggaggccgccacctgctgctgggcctcggcaccaggatactcgttggcgtgccggacaactcccgcggctgctccgagctgctgtcgtgggcgatcggcgccgtcgccaagcccagcgactccgtcgtcgccgtgcacgtcctcggagggagggggaggaagcggaggctgcagaaggccaacgccttcgtcatctacatgctcggcgaattcgtcaaagcttgtgatggcaancagattaatttgggggccaacgtgatatgc

SEQ ID NO: 16458 - DNA, 381 bp, Zea mays
  Clone ID: LIB83-011-Q1-E1-G6
ctttatttcccttgcccttttccagagcacctccgccgtcggccatgggtcaagcctggggtaatctccaagataggctccaagggcggcggtggaaggagcaccaggtgaggaagatcaccgacaaggtgttcgaccgcctcacggaggacgcccagaagcgcgacaaggaggccctcagattcgaggaggtctacatcgccgtcctctgcgtctacaatgacatcaacaagtacttgccggggccgcaccacgaccccccgtccaaggagaagctcagggccatgatggaggagtacgacgtgaacctggacgggctcctggaccgcgaggagttcgcggagttcatccggaagctgaccgcagactcgctgtgctcga

SEQ ID NO: 16459 - DNA, 364 bp, Zea mays
  Clone ID: LIB83-011-Q1-E1-G7
ccacgataagccctaatcccagcgccacctcgatggcgaccacctctttcttccatccgctcgccgccccgatggaccgcggtggcgtttgttttcgtcgctgcccgttcagcctaaccatccccgcccgtacagcgccccggcgaccggcgccgcttctcgtcgtccgcgctaagcgcgccggcagccaggcccctgctgccgccgcctcgcgtcagcccgcgaatcccagcgcggtcccgaagcgggacgtggaagaagaggaggaggaggtcgaggaggagatgccctggatccaggacaaggcgctggacctcgtggagttcactggcaccgtcacacaggccatcccagggccccgtgt

SEQ ID NO: 16460 - DNA, 362 bp, Zea mays
  Clone ID: LIB83-011-Q1-E1-G8
gctcgaggaatggcgtcggtgcaggtctccggcgcgggggtcggtgccgcggccttctctgtgaaggggaaggcctccaccggtgcgctccggcttcgctctacgttgaccttcggcgaggtctgcccggcgcggcgggcgttccgcggcctcgtcgtcagggccgctaccgtcgtcgcccccaagtatacaacacttaagcccttggctgatagagtgcttgtaaagattaactcttccgagaagaagacaactggtggaatcttgctccctacgactgctcagtccagacctcaaggtggcgaggtagttgctgttggagaaggaaggataattggggataagaaagttgatgtcagcat

SEQ ID NO: 16461 - DNA, 360 bp, Zea mays
  Clone ID: LIB83-011-Q1-E1-G9
gcctttcgatccttaatgaggacagtggttggagaccagctattactgttaagcagattctcgtcgggatccaggacttgctagatcagccaaatcctgctgaccctgctcaaacagacggatatcacctttttatccaggatcccacagaatacaagaggcgcgttagactgcaggcgaagcagtatcctgcattggtctgagagcttcgccctactagggatccatgctgcacatccgcatagttgttgctagtgtcttgaatgaaagaccaaatgtaacatggtgcttggagaagtaactatcgccattgtggactgtgtgtcttttaacagccttattaactgtttggagtgtgtg

SEQ ID NO: 16462 - DNA, 187 bp, Zea mays
  Clone ID: LIB83-011-Q1-E1-H1
cacccacgcctccgaagagacttgtgtgattgctttggttacaacgctcacggaatccagggcagacctgggagttaatgatcacgtgggcgtcagtacatgcgcagcggtgggatgccataagtatgcaggcggtgtcatcagtttcacttctcacaccatgggacacgtgactggtcattgttat

SEQ ID NO: 16463 - DNA, 94 bp, Zea mays
  Clone ID: LIB83-011-Q1-E1-H10
attgcgacgtggacgatatcagcgacgtgttagctcacgtcagagatggataacatgttgtagataatggaaaccaagttccggatttgtcccc

SEQ ID NO: 16464 - DNA, 324 bp, Zea mays
  Clone ID: LIB83-011-Q1-E1-H11
atttttatttttttttttttttttttttttttttttttttctttttttttttttttgttattttttgtgtttttttttttttttttttttttttattttttttttagacgccccaagcaaacaagccccgaaaccgtccccaaagacacacaagggaaagttacaggtaaaattacattaaacaaaggttccaacaactttcttaaagtacaggaaagcttccatttccaaaatggccaaaaacccccaacaaagcaagcacctccgacaccaaaagccatccatgtttcccaagttgttaaccaagcgcccaacacggcaaaa

SEQ ID NO: 16465 - DNA, 366 bp, Zea mays
  Clone ID: LIB83-011-Q1-E1-H12
agctccagccggtgtacctcctgaatccgaccgtgccctcagcggctcgtcgttgttcgggatgttcgctttgaaggaacgcccgaagtggatgaacatcacctcgcttgacgagctcaagacaaaagtggggcacgtcatcgtgatgattctacttgtgaagatgttcgagaagagcaagatggtgacgatagccacggggctggacctcctcagctactcgatctgcatcttcttgtcgtcagcttctctctacatcctgcacaatcttcacaagggcgaccatgaggagtgacgagagtgaaatgccgaatttgtagcctattcgagagagagttgacggtcttgtccaataatcaatactgg

SEQ ID NO: 16466 - DNA, 357 bp, Zea mays
  Clone ID: LIB83-011-Q1-E1-H2
cccacgcgtccgcccacgcgtccgcgcaagcgcaacagaagcatactacgccgctacgcgctgggcggtgccgcacagctatagatagctagcagtgttgcatagaaatggacagcgccagcagcctcgtggacgacaccagcggcagcggcggcggcgcgtgcacggacaagctaagggctttggccgccgccgccgcctccgcctcggggccaccgccggagcgcatgggcagcggagccagcgcggtcgtggacgcggccgagccgggcgccgaggcggactccggctccgccccggcctccgtcgccgccgtcgcggcgggcgtgggcgggaagctgccgtcgtccaggtaca

SEQ ID NO: 16467 - DNA, 373 bp, Zea mays
  unsure (1)..(373): unsure at all n locations; Clone ID: LIB83-011-Q1-E1-H3
gggaaaaattgatcaaacacgtatgtggaaggtgggtgaaagggtccgttcaaccaggccacaaggtgatcttggcccactgcatcccttcactgctggagtgtatgttgcactaatgatggctcagattgaggtccttangaagaagggccactcttactcagagataattaatgagagcctgatcgagtccgtggactcgttgaacccgttcatgcatgctcgcggtgtggccttcatggtcgataactgctccacaactgctcgtttgggatctangaagtgggcaccacgcttcgattacatcttgacccaacaggcgtttgtgactgttgacaagaaagcaccgatcaaccaagacctcatcagcaac

SEQ ID NO: 16468 - DNA, 396 bp, Zea mays
  Clone ID: LIB83-011-Q1-E1-H4
ccaggcctccggtcgtcgtcgctgtcgccggcggggaggacgtccgggtcggacggcgactcggcggcggacacgcgccggcgcgagaagcggcggctgtcgaaccgcgagtcggcgcggcggtcgcggctgcggaagcagcagcacctggacgagctggcccaggaggcggcgctcctgcaggccgagaacgcgcgcgtggcggcccgcgccgccgacgtcgcgtcgcagaacgcgcgcgtcgagcaggagaacgccgtgctccgcgctcgcgccgccgaactcggcgcccgcctccgctccgtcaacgaggtgctccgcgtcgtcgaggagttcagcggcgtcgccatggacatccaggaggaggtgccgccggcggacgacccgctgctccgc

SEQ ID NO: 16469 - DNA, 369 bp, Zea mays
  Clone ID: LIB83-011-Q1-E1-H5
ctggaaaacacacgcacgcagacctcccccaaccgctctcagtctctccctccctgtctctctgttcaatctctcggctcgccatggacgctccgagcaactgcacgcgtcctgcgcgcgccaagtgaccgaacaagctgagctctgctgctacagttgcttgcccctgtgccaaactggcaggaggtaggtagcttatagcatagcagctagagctaagctgtggtgcgtagcggcagctagagctagcttgtgcacgcgcaggtgcgtgctagctagctagcttgttagctgtgtactagctgtgtagcagcagcagcagcacagtagcagtagtcggtgataaaaggaatttctttggggacatgt

SEQ ID NO: 16470 - DNA, 367 bp, Zea mays
  Clone ID: LIB83-011-Q1-E1-H8
ccgaaaccagaggcgggtagggttctagctgcaggcgacggccatggccgcctccgccgccgccccggcgctgcttcgacgcctcttctgcagctctattccagcctcctcctccgtactgcgcgctaccttttgctcctccgccggcttcggctcgtcttctccgtcctccatattcggcgacgccaccgaggtcgccaacgtgccaccgctcaccacgcccaacctcttcgtcagtggcctttcaaggttaacgacagatgagaagctccagggtgcctttgctcctttcgggaggctccttgaagcaaaagtggtgacggatagagtttctgggaggtcaaagggtttcggtttcgtgagatat

SEQ ID NO: 16471 - DNA, 358 bp, Zea mays
  Clone ID: LIB83-011-Q1-E1-H9
gccgccgtcaccgccccttccttcgccgcaccagcgccagcccgcgccgtggtcagaaggaggtccttcaccgtgcgcgcctctctccgcaaggccaccggcaccgccgccgtggcaatggctgccagcgccctgcttgccggcggtgccatggcccaggaggtgctgctgggcgcatgcgacggcgggctcgtcttcgagcccagccagttcaccgtcaaggccggcgacaccatcacattcaagaacaacgccggcttcccgcacaacgtcgtcttcgacgaagacgaggtgccgagcggcgtcgacgccaccaagatctcgcaagaggagtacctcaacgcgccaggcgagacct

SEQ ID NO: 16472 - DNA, 175 bp, Zea mays
  Clone ID: LIB83-012-Q1-E1-A1
accacgcgtccgcttcaggaacatcaaaaccattgctgaaggcgctctctctgaaaccactcgagtgcagccatatgccgtgactttcgttacgcacacggccgataagctgcacgtggtccgcgacatcgtcggttcttcagtggcattccagtcactgcatctcgacgtgcct

SEQ ID NO: 16473 - DNA, 366 bp, Zea mays
  Clone ID: LIB83-012-Q1-E1-A10
cagaaactggagaaggagcgggaggagaagcagaagatggccgggtgcatccagaccctgcaagaggagctcagccacgccatggaggaacttaagaggctcaaagcgcgggacgacgaggaggccgccggaaccaaggtcatcgacctggagatcgacgagggcctctacttcaccgaggccgccgagaagcaaatggcgccgccgccacagggcgctgccggcggagcaggcgagctccagaagaagaggtacgtgacgttcgctgacccgccgacggtcgccaccaccgccgccgccgcgtgccgggcgccaccgttgccggacgtggtgatggaggtgcaccgcgcgccgccccaccagctc

SEQ ID NO: 16474 - DNA, 385 bp, Zea mays
  Clone ID: LIB83-012-Q1-E1-A11
cccacgcgtccgcccacgcgtccggacgacgtaaacgccttgctgaacaaaggcatggccgcggacagccgcttcctcatgccaattgtgctgagggagtgcggcgagacgtttcgtgggatcgactcgttggttgacgtcggtggtggccatggtggcgccgccgccaccatcgccgccgccttcccccacctcaagtgcagcgtgcttgacctcccgcacgttgtcgccggtgctccgtctgatggcaacgtgcagttcgtcgcaggcaatatgtttgagagtattccacctgcaaccgctgttttcctcaagaaaactctacatgactggggtgacgatgagtgtgtcaagatattgaagaattgcaagcaaagcatatctc

SEQ ID NO: 16475 - DNA, 390 bp, Zea mays
  Clone ID: LIB83-012-Q1-E1-A12
tcgtgggtcgacacaagcctctacactgagtcctagatgcttgaacactgcaagctgaagcatagctcactactcagcggaagtaaacaaaacgtgagacgaaaccagtggaggacagggtgtccgctcatcctcgcgtgaggtaggactaggatgtgtgcgatttgtttttttaattatgcaatccatgttgggataaaaaatgtagcagggattagttttataaagaaaaaaaattaaattactccccttgcatatgtatgatgtccatatgcccttctaaagtataagtgttgtttagttcattttatccctctatctatttgaattggtttttagtttaagttttctggttagtagttgatgccacaacttaacctaggaaatata

SEQ ID NO: 16476 - DNA, 427 bp, Zea mays
  Clone ID: LIB83-012-Q1-E1-A2
aggacgcgtgggtgcagtctcgccgctccccttcctcccccgcaggaatccgaatcagtaagtccggcgacctaggtctctcggcttgtccgcagcccgccggtcagtaatggcgcaggatgatccggttgtttctgctcagtggctgcacgagcacctagggatgcctgatgttaaggtaaaaaaaaaacatctagtttgcgtgttcatattcacttcagagacacttcagtaatgcttccttcatcgaagaagaaagttcagagatatacttcttctatcccctgcgttactggttttggatgcttcctggtacatgccggtagagaacagggatccatggaaagaatatcaggtggcacacatccccggtgcgctattcttcgacttagatggcatagttgatcggacaactgatttaccgcac

SEQ ID NO: 16477 - DNA, 372 bp, Zea mays
  Clone ID: LIB83-012-Q1-E1-A3
cccacgcgtccgctgattcagcgctaggcgtggatggagcggcgtcgttcatcttcaccaacgcctgcaagcacgcggtgtgggtgggcgcgctccacggcgccagctcgccgccgctcgcgcggtcgggcttctacctggcgccgtccgccacgtccagcatggacgcgccgtcgtcggggacatggtccggcacgttgtgggcgcgcacgggctgcgtggccgaccccgccaccgggcgcttctcctgcgccacggccgactgcggcacgggcgacgtcgcgtgccaaggccgccggccggcgcctccggtctcgctcgtcgaggtcacgctcgccgcgccgggcagccgcaggccggacttctacgacg

SEQ ID NO: 16478 - DNA, 403 bp, Zea mays
  Clone ID: LIB83-012-Q1-E1-A4
aaacagtatctgaatctttagttgcagcttgcagtgctgatactgctactcatacagttcatgggcagtagtagtactaaatacacatgggatcgacacagatcaacgttttcgtttacgtcgtgatgggtggggtcggtccattgcttcgagggaagagccgcaccggtgggtcagtcccggcgcgccggctcgtgcctggtggagacggagacggcggtggacatcacgagcatgtggctcagcgtcgcaacccaccgcttgtagacgccgtagtcgtccgtgcggagctccaccttgcccttgttcgtggagacctccactgggtatgtcgcgccctcgtgggggctcggcttctccggggagcacggctgcacgtcgtggatcacgctttcttttgcgt

SEQ ID NO: 16479 - DNA, 319 bp, Zea mays
  Clone ID: LIB83-012-Q1-E1-A5
cccacgcgtccggtggtgcttgcggcagctccggagtccaggcagcacgctagtcggggggcgcgggggaggagatatggatcggtcgtatctccccgtggcggcggcggccgtcgccctggtcctcgtgtgctgctccggcctctgccgcggcgagcggctcggggcgagggagtgcgaggacctggggttcaccggcctcgctctctgctccgactgcaacgcgctctccgagttcgtcaaggaccaagagctggtggaggattgccataaatgttgcaccgaggattcagatgattctatcagcaagctcacattt

SEQ ID NO: 16480 - DNA, 347 bp, Zea mays
  unsure (1)..(347): unsure at all n locations; Clone ID: LIB83-012-Q1-E1-A7
caccaggccgtttccgccctcatggactccgccagctactggacggcgttctgggtgttcgccggctgcaacctgacgctcctgctgctggcgtcgtccatcacggcgttcttgtcgccggcggccggcgggtcgggaatcccggaggtcaaggcctacctcaacggcgtcgacgcgcccaacatcttctcgctgcggaccctcgctgtcaaggtgcgccgtgtgtgttccgttcccatcctcctgccctcgccgtcgctttcgcttgctgcagtgcacatgctcncctcagcatttcctgatgccagctgcgcaaatgggttaacatccacactaatataatgtac

SEQ ID NO: 16481 - DNA, 430 bp, Zea mays
  Clone ID: LIB83-012-Q1-E1-A8
ggaagaactttttgcctatgatataaactgggtgatatatgacaagaatgagttgcacgagagaatgaggccttggatttcaaaaaagattattgaatttcttggcgaggaggaatcaactttggtggactatattgtttcctgcaccaaagaccacgttcaggcagaaaagatgctagagctcctacagtcgattttggatgttgaggctgagatgtttgttctcaagatgtggcggatgctgatatttgagattaagaaagtcgaatctggactatcaggaagagcaaagtaatgaagctaagcctgttaccttgtatgacctttgatttacatcactcaactgtggtcatgcttgtaaggtcatactgtactaaacaagcatcagaaaccatttttaatgatgctgattggacggttttgattctac

SEQ ID NO: 16482 - DNA, 380 bp, Zea mays
  Clone ID: LIB83-012-Q1-E1-A9
gggccgagacacgcgtcagtctgttttctttatgtcgatcatatgggatagctcccaacgcttttgttgcagatctttgctactcgataatgtcacttcaatatcatgacatcaggaaggacatagctgctgccagtcgtccgatgatctgcacgtcacatgtccaaacttcaagccgtctcgcagcattaaatatcaaacctagggtgccttgggccagttcaaccacatgttcgtagcttcactctaacgatcagcgtcccctgcacgacaccggccaaggcatccacggtggtggagctgccaccgcagttgcagatccggtatgcgccgtcgacgtccgccggggttagcggtaagcaacacgggaagggcaaatt

SEQ ID NO: 16483 - DNA, 410 bp, Zea mays
  unsure (1)..(410): unsure at all n locations; Clone ID: LIB83-012-Q1-E1-B1
gcaggcgccgcgctgctcggcgtcggcgtcggcggcgccagcgcgcagcagggcgtgtggagcatcatcactcgtcccatgttccagagcatgctgagccaccgcggcgacagcgggtgccagggcgccttctacacctacgacgccttcatcgaggccgccagcaagttccccggcttcggcaccaccggcgacgagcagacgcgcaggcgggagctcgccgccttcttcggccagacgtcncacgaaaccaccggtggatgggcgactgctccgggtggaccgtttgcctggggatactgccgggtgaaggaacagaaccgacgggacccacctactatggacgaaggaccatacagctaactcatgagtacanctacaggctcgccgggcaggcgctgaacctgaac

SEQ ID NO: 16484 - DNA, 363 bp, Zea mays
  Clone ID: LIB83-012-Q1-E1-B10
cccacgcgtccgactttccaaattgctatggctggaaggtcattctcacttctgcagaggattggagcttttgtgaggaatggtataaagcttttggcagtgggaactactgcttctttgattggcactagtgtcacgaatgcagcgctcaaagcaaagagggctgttgataaggaccttgaggacgaagtcatggaaattccagtcgtctcaactagtgttgcctatggtgtatacatgtccatttctagtaacctcaggtatcagcttctggctggtgtgatcgagcagaggatgctggagccgttgctgcataaccagaagctactgctgagtgcaatgtgcttcatcgttcgtacgggc

SEQ ID NO: 16485 - DNA, 356 bp, Zea mays
  Clone ID: LIB83-012-Q1-E1-B11
agaccgttggctaaagcaaacagcttccgcaacatgctggagatcaggtcgacagccttcgcacaatggaatggacgcgagattgaggtttcatcgtccaacggcggatcgtctactctgcatctgtgcaacatcagcctgccagttacgggttcacataaggaccaccactgggcgggcccagcattcattatgtcacacccgagtttcaggcacatcgcgcgtgctttgccaatttcatcgggcgtaaagtggaacatcctgatcgtcgcaagtactcctgtcaagtacaatgcagggtgcgccctgtagaacctgctacgatctggactgcaagaaccatcgagtcccaacac

SEQ ID NO: 16486 - DNA, 358 bp, Zea mays
  Clone ID: LIB83-012-Q1-E1-B12
cggataaactgcttgaactggaagcgaccctagtccaaaccaccgcaccgacaccgactccgagccccgccgcgccgcgctacctccgctcctctcttcgcccctgccggcgtcgaggccgaagcgaaggcgagcatgcatcacgaccccaaccccttcgacgagggcagcgccgaggacaaccccttctcaaatggaggagccggaggcggcaagcagcagtacggcttccggccgactgagcccgtcgggttcggcggcgctagcaggggcgacgccgtcgttgacgtcccgctcgagaccatgggggactctcggagcaaggtgaaggagctctcgtcgtgggaatcagatctga

SEQ ID NO: 16487 - DNA, 132 bp, Zea mays
  Clone ID: LIB83-012-Q1-E1-B2
ttgcaactccctgacgtgagtcgtattactcagcctcgtactcggaggagagaacacgcatcatggcgtctggaacatcatcacgcgtggcatgttctacagcatgcttagctagcgcggttacaggggatg

SEQ ID NO: 16488 - DNA, 275 bp, Zea mays
  unsure (1)..(275): unsure at all n locations; Clone ID: LIB83-012-Q1-E1-B3
cccacgcgtccgcccacgcgtccgcccacgcgtccgcgtgctaaagtgtcctcactgctgctctcctccgctccgcagctcatggcttcctcggtctccctccgtggcgccatcctccagcgcccccacctcacgccccgccccgacgcccgccgcgcgcccacgacgaggcgccgcgccgtgcctgcaaagatctgctgcatcggatgggaccccgagggcatcctgngcgcgccgcagggcggccacatcgcgcgcctcgagttccgccgccg

SEQ ID NO: 16489 - DNA, 356 bp, Zea mays
  Clone ID: LIB83-012-Q1-E1-B6
atcgtctgccccaactgcaacggcctcggcaagctcggacagatcgacaagtagctaaataatcccatccaccatgcatgctacgtactaagctcatatacatgtgctgatgtgcatgcatggaccaaccaaactgctcctttgtataagctcttaattaaatctcctctccgacaatgtctgaatgtatatgctgagtgagtgttaatttggtctgtaatataacctgttgctttgtcagaaacgatgttgtgcaataacattgttgtcggtggtgttgttgtatgtgctagtgatgtctctcaatatatgtatgtctatcagatcaaactgttgtgcaatcaagcttttcgtgc

SEQ ID NO: 16490 - DNA, 405 bp, Zea mays
  unsure (1)..(405): unsure at all n locations; Clone ID: LIB83-012-Q1-E1-B7
cagggcttagtggtgtgtgacatatgtggcagtggtagtgcccctcatcttattgcaaactgcgctcggtgcaatgcgcgtgagcacgggtactccctttcttttctcctacctgcctattacctttttcctttggtcttcacatactgaactcgtggaaaatgtacatatacatacaacatatgttcgtctgtgtataacatgtggtgatcagttggtagacatgctttgtaaggatgtttggatagtagttactagtgaatggtaagagaagagaagaatggtaaagagaagagaatgttttgccacagataactcatgtaaatactgtaactaaataaggccttggatatttcctccatttgttgttttgttctttacaanatagccactatctgttaaaat

SEQ ID NO: 16491 - DNA, 61 bp, Zea mays
  Clone ID: LIB83-012-Q1-E1-B8
cccatatgcatcagcagtgtgtaccactatatatgttatatactgtatttcgctaccgaat

SEQ ID NO: 16492 - DNA, 381 bp, Zea mays
  Clone ID: LIB83-012-Q1-E1-B9
agggcgggtctccctcggcgacctcttcttcgacgagccctcctcgccgacgtcctacttccgtctcccgggcggcgccgactccggccggtaccagcaggtgacgtcgagcgacctgttgtcgtcccacacgactacgtcgacggccagctccggtgcagccggcgtggcgcgacgacgctctccgatgaggtgcccgtcgcaccgccggcgcccggtctccccggacccgtgactcgatcgtgaagtgaagctagccgcccgtgaggcaaaaaaagaaaagcaagcgaaggtttgtttgctcatggcctcacgtagcagatggagcgtgtggtatacgtagtatgaggatgatgctgagtaattgtgaatattagcctc

SEQ ID NO: 16493 - DNA, 380 bp, Zea mays
  Clone ID: LIB83-012-Q1-E1-C1
agcagtgcaacaagcaagatttacctgcccatcgatcatatcgtcaactggtccggcagttcgcgacaccatgagctccacggagtgcggcggcggcggcggcggcgccaagacgtcgtggcctgaggtggtcgggctgagcgtggaggacgccaagaaggtgatcctcaaggacaagccggacgccgacatcgtggtgctgcccgtcggctccgtggtgaccgcggattatcgccctaaccgtgtccgcatcttcgtcgacatcgtcgcccagacggcccacatcggctgataatatataagctagccgctatttcctttccttgccccagaactttgaaataatatatatacgatgaaataacgcgggcatgccgaat

SEQ ID NO: 16494 - DNA, 346 bp, Zea mays
  Clone ID: LIB83-012-Q1-E1-C10
cactcagctcataggatggacgccgctggtcgaattgaagcgaatcgccagcgaggctgggatcgatgcgcggatcgtcggcaagatggaggcttaccagccactttgctccatcaaggaccgctctgctttgagaatgatagaggatgctgaggagaggggattgatttcgcctggagtcacaacactggtggagccgacgagtggtaacatggggttagggttggtcctcttcgctattcagagaggttacaggctcattgcagtcatgccggctaaatactcgcttgacaagcagatcttgctgaggttcatgggcgcggagctatacttaactgatccgggc

SEQ ID NO: 16495 - DNA, 345 bp, Zea mays
  Clone ID: LIB83-012-Q1-E1-C11
caccaaaccaaaccgctctcgagtctccatccattctctccgctcatccgcagctctctagtctccagctctagctagccttagcctcgtccaagggacgaaggggccaccatgagcgtggtgatcctggacggctccacggtgcgcggcttcgtggcggacgaggcggccttcgcgcgcagcctggacgcgcgcttcgccgcgctggacgccaacggcgacggcgtgctgtcccgcgccgagctccggcgcgcgctcgagtccttccgcctcctcgacggcggcggcttcgggtccgcccagccggcgccgctccccgccgaggtccccgcgcccgcgccgtcc

SEQ ID NO: 16496 - DNA, 411 bp, Zea mays
  Clone ID: LIB83-012-Q1-E1-C5
cggacgcgtgggcggacgcgtgggcggacgcgtggggagaccgcctcgttactcaccacaccgtgctcgggccggagcagagaaaggtaactcgcctcctccccttcgacgccacccccgcctccgtccccaccccctgctactccgcccccaccccctccgcctccggcctagccactgtttgcccagtccccgtcactctgaaaggagcagcagcctaaggcatcgctgccaagagtggataacaaatcaaaagggtgatcatctcggtgcccaccaaacctcaacaatcaagtttcatgtctaatctcgacgttcagcttccatctgctttgatttgtttgtcgaggcagatgctgaggctctggttttgctcctggaacgaaggattacgtgcatgttcgcatccta

SEQ ID NO: 16497 - DNA, 410 bp, Zea mays
  Clone ID: LIB83-012-Q1-E1-C6
ggacgcggacgcggctcacatcaaacaccccctcctcccccttcagctgtgctcactgccgcaaaaccacacagccacacaggcaaccagcgcccagcgccctttgacatcaccacatccacgctccgttccatggccatgtcgagcagcgccagcaagaagcaagcccaggcccaggcccagaaggccgggcgaaggcccccggcggtgtcgtcggccgcggccgcggacgcggagatgcagagggtgttctcgcgcatcgacgcggacggcgacgggcggatctcgccgtcggagctggcggcggtgtcgcgcgccatctccccgccggcgagctcctcgcacgggcggcgcgaggtggcggccatgatggaggagctggacacggaccgcgacggcttcgtggacct

SEQ ID NO: 16498 - DNA, 417 bp, Zea mays
  Clone ID: LIB83-012-Q1-E1-C7
ctcgatccagacagcaggcagcagccatgtccaaggtcttcaccctcgacgcggtcgccaagcacaactccaaggaggattgctggctcatcatcggcggcaaggtgtatgatgtgacgaagtttttggtagaccacccaggaggtgatgatgttctgttgtcctcaactggcaaggatgcgactgatgatttcgaggatgtcggtcacagcaacactgcccgcgcgatgatggatgagtacttggtgggtgaaatcgacgcgtcgacgatcccttccaggacgaagtatgtccccccgaaacaaccgcactacaaccaggacaagactcccgagtttgtcatcaagatcctccagtttttggttcccctggcaatcctgggcttggctgttgccgttacgatgtacaccaagtcgg

SEQ ID NO: 16499 - DNA, 420 bp, Zea mays
  Clone ID: LIB83-012-Q1-E1-C8
cccacgcgtccgcggacgcgtgggttgcaataactgtgctgctaggcacccactccccagtcaaggcatatccattccatggatctcgcgcccctgctccttctctcccagctgctgctgcttccggtggtggcggttgtctccggcgagaccgccgcgcacccgggctacacgcacgctgaggaggcatgcagcggtgtgctagaggcagaggcggagaaagcaacggtgctggtgcctgcgccagagcggcgcgaagagttcgacggcgggcggatcgtggacatcagccactactaccgcgaggacatgccggagtgggagtcatcagagggctccggcgagttcctgcagctggcgcggtccatgcgcaacggctccgacatcgctaacttctcggagctccggctcactgcgcac

SEQ ID NO: 16500 - DNA, 316 bp, Zea mays
  Clone ID: LIB83-012-Q1-E1-C9
gggagcgtgcggctgctgctgggcgttctcggcggtggcggcggtggaagggctgaacaagatccggacggggcggctggtgtcgctgtcggagcaggagctggtggactgtgacgtcagcggcgtggaccagggctgcgacggcggcctcatggacaacgccttccagttcgtcgcgcgccgcggcgggctggcctcggagtcgggctacccgtaccagggccgggacgggccctgccgctcgtccgccgccgccgcgcgggccgcgtccatccggggccacgaggacgtgccgcgcaacaacgaggccgcgctc

SEQ ID NO: 16501 - DNA, 249 bp, Zea mays
  Clone ID: LIB83-012-Q1-E1-D1
gcctgcagcaacttgcaggtgataggtgagggcacacacacacacagagacacggctgcatctctgtgattaacacattactggtctcctgcagcctgctgtagtggtgttgctgtgcctttggattctagaagacattctgtatataaaacagcactcctaacagttcagtctagaacctagaagtagaaactgttattgttatgatacggaagcactttaggggaacagttggagacacatttttat

SEQ ID NO: 16502 - DNA, 375 bp, Zea mays
  Clone ID: LIB83-012-Q1-E1-D10
ctcccatctctcaaacatctacgaagaacataggtccatgctgtagcttcagctcgtcttctgatggtaatggatacatggctggaaactctagcgagagtgatgaagactatgttaattctactgtgctagaagcagttgaggtgagaagtggatcagaaggatatgtgataaagatgcgagatggaaagaacttgcgttgtgtccatagtaattttcaagggagaaatattccagagaatacaccacaacctgctattgttttgaggattgaagatggaagcggaactttactcccgatcattgttttggagatgccaagcgttcttctgatggcagctattcgtaatgtccacattgcacgaccgaccatat

SEQ ID NO: 16503 - DNA, 370 bp, Zea mays
  Clone ID: LIB83-012-Q1-E1-D12
gcttccccagttcccccagctccccccaccttccgttgccttctcgaactcaacccccgcccccgtcgcggatcgtcatggccgccggcctcgccttccccgtcgcctcctttccactcgcctgcgtctcctcacctccccaccccgggcaccgcatctgctgcgcgatcccgtcgtcgtcctcgcgccgcaccgtcaaatcctcgccgctccgcgcgactaccgtcctctccagggaacgacggggcacgggccgtggcgcgtccgtagtgtgcgctgtccaaggccaggacacgaccatccaagatgtgacaaagtcaacatggcaatcactcgtgatcgagagcgagcttcctgtcctggttgagtt

SEQ ID NO: 16504 - DNA, 407 bp, Zea mays
  Clone ID: LIB83-012-Q1-E1-D2
aacaatttatcatgtgaagagccatctgcagataagaaggcttcctcggaggataaaaaagcacaattaggaaagggcagcattgattcaagcaaaaacaagaatttacaagtggcagaagctctaaggatgcaaatagaggttcagaaacagcttcatgaacaattagaggtgcaaaggcagttgcagctacggatagaggaacatgcaagatacttgcagaaaatactagaagagcagcagaaggccggcaatgtgccactaaaagctccaaccaaagcacaagcaacaaagtcgtcacctgaatcgacgtcagacgagagaactgaatccgaggtagacaccatttctccgcggccacccaagaacaggaacccgggtgtagacgcagaatgcaaatcgccggg

SEQ ID NO: 16505 - DNA, 142 bp, Zea mays
  Clone ID: LIB83-012-Q1-E1-D3
atttaattagtattgcacaatgaaaaattcaacatcaaataaacaaccaacaggcatcacaacaaaatttgtatatctatgtgattatgtgtataaaaattggtgatttgtgatgcatttgtatatataacagttgttgaat

SEQ ID NO: 16506 - DNA, 423 bp, Zea mays
  Clone ID: LIB83-012-Q1-E1-D4
atgaccatctactcaacctagtgctagatgaagcagttgaatatgaaagagagcaagatgacccattgaagctatcagggaaaaccagacagcttggcctcattgtgtgcagaggcacggcagtcatgctggtctcaccgactgatggaactgatgagatcgccaacccttttcttgcggaaggagcataagcttgcagttggtcgattatttagaaccgtgctctcatgtcaccctcagaacgatgtgtcccagtggggaaaagaactctctattctcgtaccggttggtgatgaactctgtaatattcaccgtgcaagtgcaacttaaaacatctgtgatacgagctcttttttttaaaaaaaaaaaaaaaaaaaaaaaaaaaaaaaaaaaaaaaaaaaaaaaaaaaaaaagggcggccgc

SEQ ID NO: 16507 - DNA, 108 bp, Zea mays
  Clone ID: LIB83-012-Q1-E1-D5
agcgccgccggccggcaggtgcaggtggtgactttgtaacgtgtgtgcgtgcgtacgtgtacattgcatccatcttggttccaatggacatatagctcctgttgctcc

SEQ ID NO: 16508 - DNA, 416 bp, Zea mays
  unsure (1)..(416): unsure at all n locations; Clone ID: LIB83-012-Q1-E1-D6
cggacgcgtgggcggacgcgtggggccgcggagcgtctgcgccggttcgaggtgtaccgccagaacatggagctcatcgaggccacgaaccgccgcgccgagctctcgtaccagctcggcgagaccccgttcaccgacctcaccagcgaggagttcctcgccacacacaccatgtccacgcgcctgcatgcgtccgaggccgcgcggcggcaccgggagctcatcacgacgcacgcaggccccgtcagcgacggcggtcgccagtggaaccggcggaactacacgacggacctcgacgtccccgaaagcgtggactggaggaccaagggcgcggtggcgccggtcaaggaccaaggagcttgtggcggttgttggtcattcgcgacggtggcggcgatcgaanggctgcacaagat

SEQ ID NO: 16509 - DNA, 418 bp, Zea mays
  unsure (1)..(418): unsure at all n locations; Clone ID: LIB83-012-Q1-E1-D7
cccacgcgtccgcccggccatctcaccgaggacaacggtttcgatgttttcgtcaatggacgacgtggcggcggcggcggcgtcggcatgaggagggccaacatcgcggactacttcgttggccctggactggatgatcttatcgagcagttgacccagaatgatcgccgaggaccaccacctgctgcacagtcctcgatcgacgctatgcccacagtgaagatcacccagaggcatctcagtggggactcgcattgccctatctgcaaggagaagttcgagatgggatccgaagaagcaagagagatgccatgcaagcacctgtaccactccgactgcatagttccttggttagagcagcacaattcctgccccgtntgccgttacgagctcccgccacagggctctgccacgggtg

SEQ ID NO: 16510 - DNA, 421 bp, Zea mays
  unsure (1)..(421): unsure at all n locations; Clone ID: LIB83-012-Q1-E1-D8
cccacgcgtccgcccaaggcttctttaatcattattaattagaggttattcatgacggtgtgcagccttcttttatttgacttagagccagtatggattacagagctgttgttgtggaaattgtctagctgtcttcattacttaataatcttttggtagatgctgttgatcctgttttacctgaattcaggaaacagctggagaactcaggcaggactttccaccagaaatacaagttggttttcatgttggaaatcgaaatttagtatgtaccatgacattgtacagttcgatagtagattatttagagtgttgtaagccttgtagcttatgtttttgttggcatcaaggtatcattcctgtagctgaaaaataaacgttatattgtcagaaatatggaattctaggttgtntttgttcc

SEQ ID NO: 16511 - DNA, 359 bp, Zea mays
  Clone ID: LIB83-012-Q1-E1-D9
cacgcccacgacgctgctgtggccatcgccggggagagaaggcggcgccgcgcaccggcgcgacgggtacgcgtccgacacgctgggcacggccaccgcggacgacgccaaggagaagggcgtcgccgtggaggaggagggcccccgcgtcccgacccagtgggtggcgttctccgccgaggcctcgccgctggaccgggtcagcgcgtgggtgaacagcctcgggaactgctcgttccacgccgtcgatgaggacggtggcgccacggggcacggcggcgacggcgcctcgcgcccgcgacgctctgagatcgtggagctgccgacgtccgcggccggcggaaggaggcatccgcagc

SEQ ID NO: 16512 - DNA, 389 bp, Zea mays
  Clone ID: LIB83-012-Q1-E1-E1
gaggacaacttatgaagccatgtaaaggaattttactttttggcccacctggtacggggaagacaatgctggctaaggctgtggcaactgaggctggtgctaatttcataaacatatcgatgtcaagcatctcttcaaagtggcttggtgaaggagaaaaatttgtgaaagctgtgttttcactggcaagtaaaattgctccaagtgtaatttttgtggacgaggttgatggcatgttgggaaggcgggagaaccctggagaacatgaagccatgcggaagatgaaaaatgagtttatggtgaactgggatggtctgagaacaagggagaaagaacgtgtattagtacttgctgcaactaacaagccatttgatcttgatgaggctgtt

SEQ ID NO: 16513 - DNA, 393 bp, Zea mays
  Clone ID: LIB83-012-Q1-E1-E10
ctgaaggatgccattgcaatgcacaacactgctcgttgcagcattggtccacctgttggagttggcgatgttgacttgctggataacgcgagccctcaagagaaacctgcagaagctagcccacggtagattcatgagaatgagctccacctcatccacttctacgtcctgctcattgttttcttcactatagatctcaatgtaatcagttgtggagaacataagtagcctcggttcatgaatcagatgtatggattattgtaacgcattcttgaaagggaaaaacatgtattatagcgtgataactgtaccttttgtgtttgttgtacagaaccatagaattgtacttcattttaggtgaagacgcctttgaacatttaagctcccttgtgg

SEQ ID NO: 16514 - DNA, 404 bp, Zea mays
  Clone ID: LIB83-012-Q1-E1-E2
cggacgcgtgggcggacgcgtgggcggacgcgtgggccgccgctgacacgttggcccgacttaaccttacgatggccgccgcctccgccatcaccgccgtctccggcgttgtgcttccccaaaccttcctatcccaccggtcgccgccgccgcaggtcctagccgtggcctcctcattccaccggctctccttgtgcgcttcccatcgccgaatcactcacataatcccccgcgctgatgcaagtgccgaagctggagaaccggagcctgtcactacttcagctgaatccgaagaggaggtggccgaggggtctgtcgctgtggcggaggcggaggaaccgacgccgccgagcaagccgaaggttaagttcggcgaaataattgggattctgaataagcagttc

SEQ ID NO: 16515 - DNA, 436 bp, Zea mays
  Clone ID: LIB83-012-Q1-E1-E3
cccacgcgtccgcacgtagatagcagcagcagcagcggagctgttcgacgaaatgccgccatggccgccgtgcctccagcctaccctcaccaccgctcgccgcgccaccgtattctccaggacgaaatgtctctcttctacccccgcctctcctacctacgagcaggggcaacacgaggaggagccatcgttggtcgttgtggggggcggcgcggcgggcgtgtacgcctccataagggccaagacccttgctccgcacctcaacgtcgcggttgtggagaaaggcaggttcttgtccaaggtcaagatctccggcggtggccgctgcaacgtaaccaatggccatcaccttgagcccatgggactggcgagaaattatccaagggggaacaaggagctccgaggatcctttctttacgctcacggtccgcaagat

SEQ ID NO: 16516 - DNA, 429 bp, Zea mays
  Clone ID: LIB83-012-Q1-E1-E4
cccacgcgtccgggtcgacctcggcgggcggagcagcaaggagcgggaccgcaaggtgctgctcgagcagacgcgcgaggagcggcgccggcgccagggcctccgcctccagaacacctccgccacgaagatccaggtctgttgacgactcgctgcccgtggcgtggctcagggtaggcgttggagcagtacgatcgtgcaggggtttatctacctccgctctcggtagtctcatgggctctgaaatccaactatgagccttttggcggttgtgaatgctcatggctcagctggttttctttggctgaaccgctgaagacggattccgtgttaggatatagctttaggcttctcggcattaaaatggaccgctaacttggcttcttttccttttcctcttgtgtggtgagaggatgagttagcgtgttc

SEQ ID NO: 16517 - DNA, 160 bp, Zea mays
  Clone ID: LIB83-012-Q1-E1-E5
cccacgcgtccgtgtaaattcattgatgaaatccttcggtttgtggagcttgtgctattaatgtacttttgacatttacaaaatctgtgctgtgttcgtggtgcagaaaagttttgttctgagtattatcttgaaacttttgttcaaccaaccttttgag

SEQ ID NO: 16518 - DNA, 429 bp, Zea mays
  Clone ID: LIB83-012-Q1-E1-E6
ctcgctgttccttcctcatggccaccgcctgccacctcgccgcgccgctcggcctcgccccgttgccccgcggctgcgcctctgctggcgtcgtggccgtcgtccggtgcgctcggtcgtcaggctccaagatcccgagaggcgttgctgtcagggcgacgtccggcggcgagggcgccacggaggaggtgccggagattgtgaaggctgcgcaggacgcgtgggacaaagttgaggacaagtacgccgtggccaccatcggtgtcgctgccatcgtcgcgctctggacggtagtaggtgccatcaaggccatcgacaagcttcctcttctgcctggtgtccttgagattgttggaattgggtatacagggtggttcacataccgtaacctcgtcttccagccagacagggaagctctgatcggcaaaa

SEQ ID NO: 16519 - DNA, 415 bp, Zea mays
  Clone ID: LIB83-012-Q1-E1-E7
caccactccgcgctagctgaggacggtacagcggcacagaggtgcgacgtacgacgacgacgacgcaggcgccacacatggcatcccagctctccgccgccgtgccccggttccacggcctccggggctacgccgcgcccaggtccgcggtggcagcgctgccgtccgtgagggtgggcaggaagaggtcgtcgtcgcagggcatccgctgcgactacatcggctccgccaccaacctgatcatggtgacgacgacgacgctgatgctgttcgcggggcggttcgggctggcgccgtcggcgaaccgcaaggcgacggcggggctgaagctggaggcgcgcgactccggcctgcagacgggtgaccccgccgggttcaccctcgccgacacgctgggctgcggcgccgtcggcca

SEQ ID NO: 16520 - DNA, 283 bp, Zea mays
  Clone ID: LIB83-012-Q1-E1-E8
gacgcgcgggtcgacgcacgcctctacactgagctccactagctgaggccggtacagcggcacagccgtgcgacgtagaactaccacgacccaggcgcggcacatggcatcccagctcgccgccgccgtgccccggttcgacggcctccggggctactccgcggacaggtcccccgtgggaccccagcggtacttgctggtcggcaggatgaggtcgtcgtcgcagggcgtcctctgcaacgacaccggctccgcgaccgccctgatgacccgcatcaagtgt

SEQ ID NO: 16521 - DNA, 353 bp, Zea mays
  Clone ID: LIB83-012-Q1-E1-E9
gaaaaagagaggcaagagagataggggaccggagggcggcgggccggggcccaagaccgaggggctcgtgcgcaggaagctgatgaggctcctgtcgctcgtccccttcggctgccgtgctggacccatcgacgacgcgccgccgcccgtggaccacgccgccgccgcgaggaggcgccggaggaggagggccaacagggccgcccagctgctgggggctgctgcgggtgcgccgcagcagtggcgcccctcgctcggcgacatctgcgaggagtacagcagcagcaccgacgccgtcaaggtcaggaaggcggcgtcctgggacctcgcccgggcgctgccccgcgcgcacg

SEQ ID NO: 16522 - DNA, 352 bp, Zea mays
  Clone ID: LIB83-012-Q1-E1-F11
catcaatttaccggcaggttattttaccagtcacaatgatgcttcctggaatcaaaataactatcttccgaacaaatcatggaaccttcaatcctataatatcttcatacagaaatcagaactgaactgaaggttatgagcaaggatgaactgtgttccggccgtcccgttatatgaattgtgtcaagggtaataacaatattagtttggatggagcaggaacaagcattgctgcattggaaacaatctggaatgctttgggctttaaatcccgtaccgtttttaggtaggattaagctcatgtaacacagcaaacttttcacttagatgcactatgaatcaagtgaatcgt

SEQ ID NO: 16523 - DNA, 395 bp, Zea mays
  Clone ID: LIB83-012-Q1-E1-F12
gactcgtggttcgtcacaacaccctagactgagtcgtactatagtctccagtccgacactccgactcactccccctcccccgccccaacccgtcgcaatggccgccgtctccgcagccccgaggccctcgatgcctccccgactcgccctccgtgcccacctcttctcctccgcctctccgctcccaatgcgcgcgctccccttactccgcagccgcttccgctccttgaccacggcctacgctgtcaagcaggacacggccctctggacccctgcacccgtctccgccatcagtgctgccaccgacgacggctccgtctccctcatcgccgtcgacctatctgacgccacggacctcgtggactcgtacacgaacccgggccaatacctcctga

SEQ ID NO: 16524 - DNA, 407 bp, Zea mays
  Clone ID: LIB83-012-Q1-E1-F2
acttcccaaaccctaccggcggcgcagcagcatcacaaccaccgcccgaagatggtgaagtttctcaagcccggcaaggccgtaatcctcctccagggcaggttcgccggccggaaggcggtgatcgtgcgcgtgttcgaggagggcacccgcgaccgtccctatgggcactgcctcgtcgccggcctggccaagtaccccaagaaggtgatccgcaaggactccgccaagaagacggccaagaagtcccgcgtcaagtgtttcatcaagctcgtcaatttcactcacctcatgcccacccgctacaccctcgacgtcgatttcaaagacgtcgcctcgggcgggcccgacgcgctctccacccgggacaagaaggtcgaagcctgcaaggccgccaaggcgcgcct

SEQ ID NO: 16525 - DNA, 367 bp, Zea mays
  Clone ID: LIB83-012-Q1-E1-F5
gtgcaaggagatgccacagtggatgctgtctttgctaagatcgacgagctgctgggttctatcctggagaagaaaaatgaaatggtgtccagcacatgagcaaggggaatatatctgaagcacaggacgacacgtacaagtaatgtaagccagtctcacgtaatggaaatttctccatgtggatgtggtcaaagcataggattttttttctccaattgttaactgtacgcgaatggaagcgacagatcatttgtaggttgtgagggcttcaaagatcatctgctgctgtacatgttttgttgctgtcctgtgaacatacatgttttgttgtttctcaactggaggaatgctgttaacctgctgctcc

SEQ ID NO: 16526 - DNA, 424 bp, Zea mays
  Clone ID: LIB83-012-Q1-E1-F6
cccacgcgtccgcagggataatgcaccagacgtgaaggccaaatttgtaatcgaagctgctaaccatccaactgatccagaggcagacgagattctcgccaagaagggggtagtagtattacctgatatatatgctaattcaggtggcgtggtcgttagctactttgaatgggtgcagaacattcaaggtttcatgtgggatgaggagaaagttaacgatgaactagaaaagtacatgagcagtgcttttcaacacatgaaagccatgtgcaaatctctggattgcgaccttaggatgggggccttcaccttaggagttaacagggttgctcgtgccacccttttgagaggctgggaggcatgagaccattgaccgcgcattacagattcgacaggcgcattcaataattcgtgtccaacaacg

SEQ ID NO: 16527 - DNA, 394 bp, Zea mays
  Clone ID: LIB83-012-Q1-E1-F7
catcatcatctatctagactagagcaagctaagctcaagctcggctagcattccagaagctgcatctatcagctaccggcctctcgattcatcgcttgcgatcgaatggagaagatgaacgtggttgcgagcaggaagcagcccggcgactggagctgccggtcgtgccagtacgtgaacttctgcaagcgcgacgcgtgccagcgctgcggcgagggcaagctgggcgtggagcgcacggactacgcggcgctgggcggcgactgggacgtgaagcccggcgactggtactgctaccgctgcggcgtgaacaactacgcctcccgcgccagctgcttcaagtgcgccgccgccaagaacgagtccacgggcgccgtcgcgcagggctgggggt

SEQ ID NO: 16528 - DNA, 434 bp, Zea mays
  Clone ID: LIB83-012-Q1-E1-F8
cggacgcgtgggcgacacgacaccaagtcgaggagctcgagggcaccaatcatggccggcgtgaactccagcgtcgtcgggctcaagcccgccgcggcagtgccgcaggccgccgccgcctcatcgccggcgaagcgggtgcagctggccgcgcccgagggccgccgcgccgctctgctcggcctggcggccgtcttcgccgtcacggccaccaccgggtcggccaaggccacgatcttcgatgagtacctcgagaagagcaaggccaacaatgagctgaacgacaagaagaggctggccaccagtggcgccaactttgcgcgcgcctacaccgtggagttcggcagctgccagttcccctacaacttcactgggtgccaggacctcgccaagcataagaaagtccccttcatcagcgacgacctcgagattgg

SEQ ID NO: 16529 - DNA, 362 bp, Zea mays
  Clone ID: LIB83-012-Q1-E1-F9
gcctgaccagctaggatcagcggaagcagcaatggtgatggcgtcgtcgagcgggctgaggagctgcagcgccgtgggcgtgcccagcctgctggcgccgtcgtcccggtccggccgcctggcgccgttctgcgccaacgccaccacctctggccgcgtcaccatgtccgcggagtggatgcccggccagccacgccctgcccacctcgacggctcctctcccggggacttcggcttcgatccgctgggcctcgcgaccgtgccggagaacttcgagcggttcaaggagtcagaggtgtaccactgccgctgggccatgcttgccgtccccgggatcctggtgccggaagctctgggccctg

SEQ ID NO: 16530 - DNA, 427 bp, Zea mays
  Clone ID: LIB83-012-Q1-E1-G1
cccacgcgtccgcgccacccgataataaaaacagagcgccacacgagcgggcgcaacgatgcttcaggttcgcgcgtcctcggccttcctcccctccacctcctccccctccccgccatcctcgtcgcaggcaccggcgccagcgccgttccggctctcggggaagagccagcggcgcggcgggctgatcgcggtgccgcaggcgagccgcgtggctaggcggtccgtgatggcagcggcgggggcagccgcagccgccccggcggcggccaagctcgaggacgccgacgcgctcatcgactctgtggagaccttcatcttcgactgcgacggtgtgatctggaagggcgacaagctgatcgacggcgtgctggagactctcgacctgctccgatcaaagggcaagcggctggtgttcgtgaccaac

SEQ ID NO: 16531 - DNA, 367 bp, Zea mays
  unsure (1)..(367): unsure at all n locations; Clone ID: LIB83-012-Q1-E1-G10
cggacgcgtgggcggacgcgtggggctccccacggtggggtgcgaggccgacgccgccaccgtgcacacctcccaccagcgccacgcctcctccgccgccgccttcgcgtacgccgccgcggggtcctacgtcgccgcgtggcccaggggccccgcgctcgtgctcgaggtggagcactgcgtcgtgcgccccgacgcgcccgccgaggaggccggcagggtccgggtggtgcagaccgtggcgctgggcagggaggcgcggctccgcgggctcaaggtcttcgccgagcagtggtacggcccgttccgcgacggcgagcagctcggcggctgcgccgtcngggagaccccgttcggcgccggggag

SEQ ID NO: 16532 - DNA, 391 bp, Zea mays
  Clone ID: LIB83-012-Q1-E1-G11
caggcacaggactaggactcgcgggtcgacacaagcctctacacacacgcctgtgattatggatatggtcagcaatctgggggctactatattccgaatgctgcatatgcctatactagtgcaaacgaacttgcccagaggatgaatgacctttcagttcaaaacggtgatccaaatggagccgcagcaaataagcagagcagacctgaggatgcactctttggtgatctcttgagcatcgccaagatgaagcaaaacaaacctgcagctggcaaggttggcggctaagtttgagtaaagaaggtacataattttatcttaattgccagcagcagaaacctttcctgacagcgcatataattattttgccacgttctatgcaatgccagat

SEQ ID NO: 16533 - DNA, 366 bp, Zea mays
  Clone ID: LIB83-012-Q1-E1-G2
gatcgagctgcacaaggaaggaaagaaggagacacacaatcgtcgcctgcttaaccagagcgacaatgcccaagctcaggctcatcttcaccgttattcttgtggtgtctctactgttcagtggtgtgtcttcaggacaaactgcagctacacaagccagcgatgcagatctttctgaagcggttgatgttgagagacgcagtgggaaggttctgacgtacgttcaggactacgactacggcgggtccaaccccaaacatgacccacgcaggaagccagggaccggacaccctcaataggtacccaaggataaccttccggtgacgctccagccactggactctgctggtacctacctactcttgc

SEQ ID NO: 16534 - DNA, 432 bp, Zea mays
  unsure (1)..(432): unsure at all n locations; Clone ID: LIB83-012-Q1-E1-G3
gtttatgccgcccacttctgctgcagaaacagtccgaatatgtgcttttccagccagccgtttgggattgcaagatattgggatcagtcccgattgcaatccagagaacagggctagcccaagacagctgtttaactgggctctggaacctgctgctgatgaaactctagacaaattatacgagcttgggtacctggacgcagctgtatgggctgagcagaattatgctgagcttatcgccaagaatgatcaatcccttgtcgctgattgaattgagttcagtttgcccagaagtaattttggtatccaaagctgagttcatgagaatccatgcctgtaatatattgtaaagatagcaccgtcattgtcgaaggtggcattgttctgcattggatttgggtgtttatgccagcattttcgtanctgtgacat

SEQ ID NO: 16535 - DNA, 409 bp, Zea mays
  Clone ID: LIB83-012-Q1-E1-G4
ctttgacaggagaagggagaacatgcaaaactaccagaacagagatgggcctcctgcccaaggtttcaatggccctccacctccacctggccagaaccagatgccatcccaccatggtcagggcaacatgcctccgcaaccaccacatgctggtggcggccaaccaaactatcagccccaaatgcaaaacccacagacgggctacaaccctggcggtgctcctcactaccagcaaggtgctgctcctggctaccaaggtggacctccggggtatcaaggtggtaaccaagggaacccaggccctgcctaccaaggtggtaacactggttatcaaggtggcaacccaccacctccctaccaaggaagcaacccaccacctccctaccagggaagcaacccaccacctcct

SEQ ID NO: 16536 - DNA, 333 bp, Zea mays
  Clone ID: LIB83-012-Q1-E1-G5
acgcgatgggacgacgcaagaccctacagggagtacgtactcagttcttcaatacatcatcaattatcgattaaaaaaaaaaaaaaaaaaaaaaaaaaaaaaaaaaaaaaaaaagaaaaaaaaaaaaaaaaaaagaagggaaaaaaaaaaaaagaaaaaaaaaaaaaaaaggggaaagaagaaaaaaagaagaagagaaaagaaaaaaaagagaaaagaggaaggaaaacaaagaaaaaaaaggggggggggggacaagggggtcgaaacggaagtcggggggatgggaaatctgaaaccccgagaaggggaggcggaaaaggaagtaagggg

SEQ ID NO: 16537 - DNA, 401 bp, Zea mays
  Clone ID: LIB83-012-Q1-E1-G6
cggacgcgtgggcgcagctcctctcctccgtcgcgaagctcgcgctcacggccgcgctcgtctgcggctctggcggtcccgctgccgtcgtcgtcgtcgttccggccgccgctcaagccgtcccgttcgtccgtcctcctcctcccctgcaagggaaggccttaacctcctccaatcctttaggcaaattccaagaaccggaaccttggcctcgacaacctcggaaagatcaggccatgcccgtcaaccaacccggggtgcgtgtccaccaacccgctgggatcctccggctccttcgcctcgccactgctcatcccggaatcatccgcaggggagaaggccgtcgcctcgctgcggcaagccatcgagaagacgcagcgtaatgtggagttcaaggtcga

SEQ ID NO: 16538 - DNA, 430 bp, Zea mays
  Clone ID: LIB83-012-Q1-E1-G7
cggacgcgtggggtaaaacatgctcatgttttgctcccacctttggagacattgtgtacagtggaggaaacttgtgtccgtgataaagcagttgaatctctgtgccgtattggtgcacaaatgaatgaaactgacattgtcgactggttcattccagtagtaaagaggctagcagctggagagtggtttacagctcgcgtatcgtcctgtggtcttttccacatagcctatccaagtgcgtcggaccaattgaaaacagaattgaggactatctatggtcagctatgtcaggatgacatgcctatggtcagaagagcagcagcatcaaatcttggaaagtttgcagctacagttgaacagaatcatttgaagacagaaataatgtcaatatttgatgatttaacccaagatgatcaagattcagtgcgtc

SEQ ID NO: 16539 - DNA, 406 bp, Zea mays
  Clone ID: LIB83-012-Q1-E1-G8
ccgacgcgtccggtcagccgagtccgcgctgcggccccatcggttctcacgctcgccacaccatgcggacgcatcatccatgttctgccgctgcagcattgagatcgcggcggccttcccctgcatcgacgacgacaacctcccggcatctgctgcatgcgtccgcctcgtgccgccaccgcgggcgtgctgctgatcgtgtcggatgctgtgctcgagtcccgcgggttcactgtgctgcgcacggcggatggcatcgacgtgtcggcgctgaccaaggtgttcttgctcatgggcttctcgctacgtcaggaggagcagctgcagcacgcgctggagcatatccgtctggtgtggctgtcaagcagtgaggacgaagggcggcccgtggcgttcgcgcgctcgg

SEQ ID NO: 16540 - DNA, 120 bp, Zea mays
  Clone ID: LIB83-012-Q1-E1-G9
cccacgcgtccgcccacgcgtccgcattccatgcatctcgatctgtatgtactccgcccgtcgatggatgatgcatccatctctacttgttttcctcacatgtacaacaattaatgcaac

SEQ ID NO: 16541 - DNA, 114 bp, Zea mays
  Clone ID: LIB83-012-Q1-E1-H1
cggacacgtgggcggacgcgtgggatcgtgtttcaacttgcccttgattaaggcgctacagctactgccaactaaatgtagtattatgtgagctctttttcatcgagaattcct

SEQ ID NO: 16542 - DNA, 128 bp, Zea mays
  Clone ID: LIB83-012-Q1-E1-H10
cccacgcgtccgcggacgcgtgggtgtatatcttatttctcttcaacattttctaaatcatgtcgtctatatgtaaatatctatattagaaacaatttcttcaacattttcttcaacattttattttt

SEQ ID NO: 16543 - DNA, 374 bp, Zea mays
  Clone ID: LIB83-012-Q1-E1-H11
cccacgcgtccggtggaaaccatgctgtttctggactcaagttccgcatattgagggagtttttgcagctcggatacagtgttctgctctctgatatcgatatcattttcttccaaaatccatttgattatctttacagagattctgacgtagaatcaatgagcgatggccacaacaacatgacagcttatggattcaacgatgtgttcgatgagccttcaatgggctgggcaagatatgcacatacgatgcgcatatgggtttataattctggattcttcttcataaggccgacgattccttcgattgagcttctcgatagggttgcttaccgcctttctcatgagcccaaatcatgggaccaagcagttttc

SEQ ID NO: 16544 - DNA, 417 bp, Zea mays
  Clone ID: LIB83-012-Q1-E1-H2
cccacgcgtccgtttttttttttttaaacaagaatttgatcttcatttatagaaccgacccatatgagctagtatgtcattgctacaaaatctgcagcagctgatggctaccccatgatttgtcaatggcagcataaaagctcgaaacaaaacacccagcagtagtagcgctacacacacacacacacacacacacacacacacagagagagagagagagagagagagagagagagagagaacttcaatacatggcaatacgatttattcatcctgggaggcgggtgacttcttcttggcaactgaagccctctttcccttaagtgtccggcagttgttctttgtcctctggccacgaactgggagtccaagcttgtgccggatgcccttgtagcacctaatctccttcagcctctc

SEQ ID NO: 16545 - DNA, 430 bp, Zea mays
  Clone ID: LIB83-012-Q1-E1-H4
ccggcgcagcggaagcagcttccatggctgcccaggctttgctcggagctcccctctcctgctgcgctcgcccggccatgctccacctcgccccatcgcgacgctccagctcgcgtcgagctccccatcgaacctccatggcggccgagctcacagcctgcgcgcgctccggctgctttgctccagcgtcgcgcgctccgctcctgcacgccgagcgtcctcttcagctccttggtcgaccttctctcgcgctctgctcctctctcttccttgccgcggagctcctgtgcgcgcgctgttcctgctcgccgagctgttctctgccctgcgcacagccacttttcatctccctgctcagctcaccgcgctgaactgcccagcgccgcgcgcgcttgcccctgatgcctctcgcgtgatatttggatctcgt

SEQ ID NO: 16546 - DNA, 425 bp, Zea mays
  Clone ID: LIB83-012-Q1-E1-H5
cccacgcgtccgcaccaccaccccgccggccacactcgtctttctcacgagccacaggcacaggcaggctctcgagctcagtccacccagcgcaggggatggcgtcgtcgttcgccgtggcaacggtcccgtcgctggcggccccggcggccaagaagcggtccggcggcgtcacgtacgtggagggcatgaacgcctacagcggcctcaaggggctcaacaaggtgaacatgctcggggtgcgcaagaccgccgactactccttcgccaaggtcgtggcgtcgctcagccccgcgggcaggaagcggcgcggcggcgcgttcggcgcccagatgaacgccgccgccgagatcttcaggatcgccgccaccatgaacggcctcgtgctcgtcggcgtcgccgtcgggttcgtgctgctccgggtg

SEQ ID NO: 16547 - DNA, 415 bp, Zea mays
  Clone ID: LIB83-012-Q1-E1-H6
gggcgcacgaggagaacggcggcgtctgagatcgcgaggccgaggcttgtcccgtctccgctccgctccgcccacccacggtttctggaggacaattcttcgctgtctagccttcctcaaaagtaaaaagggtaaatgggatcagaagggccttcagttgtcactgtccatgttactggatttaagaagttccatggggttgctgagaacccaaccgagaaaattgtgaccaatcttaaatctttcttggaaaagcgagggttgccaaaaaatcttgtcctcggaagctgcacagttctcgaaacagcaggggaaggggcacttgccacattatataaggttttagagtctgctgttgcagacagaggaactgggtcctcggcacagggacaagtaatttggattcactttgggg

SEQ ID NO: 16548 - DNA, 423 bp, Zea mays
  Clone ID: LIB83-012-Q1-E1-H7
cggacgcgtgggcaacacgctggggttcaagagcgacgcgtcgctctactcggccgtcatcactggcgccgtcaacgtcctctccacgctcgtctccgtctactccgtcgaccgcgtcggccgccggatgctgctgctggaggccggcgtgcagatgttcctgtcgcaggtggccatcgccgtcgtgctgggcatcaaggtcaccgaccactccgacaacctgggccacggctgggccatcatggtcgtcgtcatggtctgcaccttcgtctcctccttcgcctggtcctgggggcccctgggctggctcatccccagcgagaccttcccgctggagaccaggtcggcggggcagagcgtcaccgtctgtgtcaacctgctcttcaccttcgtcatcgcgcaggccttcctctccatgctctg

SEQ ID NO: 16549 - DNA, 84 bp, Zea mays
  Clone ID: LIB83-012-Q1-E1-H8
cccacgcgtccgcacacgcgtccgcccaagcgtccgcgcatctctcaactcacatatcatcactggggccgtcaacgtcagttc

SEQ ID NO: 16550 - DNA, 374 bp, Zea mays
  Clone ID: LIB83-013-Q1-E1-A1
cggacgcgtgggcggacgcgtgggcgcgctcgctttgcttcctcgtcgaggtccaagttcctgcattgatggcgaccgaggtggctgagactcccgcgccgttggcggaggcggtccccgagacccccgcggaggcaccggcggcgcccgccgccgaggcgaagcctaccaaggccaagaaggcctctgcgcccaagaagcgtgccaacccgacccacccgccgtacgccgagatgatctcggaggctgtcacgtcgctcaaggagcggacggggtccagccagtacgcgatcgccaagttcgtcgaggacaagcacaaggacaagctcccgcccaacttccgcaagctcctgctcggccagctcaagaagctc

SEQ ID NO: 16551 - DNA, 405 bp, Zea mays
  Clone ID: LIB83-013-Q1-E1-A10
cgaggacgagaagccgcggcccgagccggtgtcctcctccgagttccagttcgcggcgccacccgagggctacgtcgagcccgcggcgtttgacgagctaccgccggagtccccagaaggagtggcggcggcgtacgaatctctctacgggccggccttcagcggcgagacattgctggggaacaatgtctttgaggtcaaggtggtcgaccccatcgacatggaccgggagcagcgcccgaacgacgatttcaccgagcgcgtcgtgcaggtcaaccgcgtcaccaaggtcgtcaagggagggaggcagctctcctaccgcgcaatcgtcgtcgttggcgacatgaagggccacgttggtgtccgcgtgggaaaggccaatgaggtcacggaagccatcaccaa

SEQ ID NO: 16552 - DNA, 404 bp, Zea mays
  Clone ID: LIB83-013-Q1-E1-A11
cccacgcgtccgtttcaggaaggattcgggcgtatgttcttattaggctcgtacaagtccaagttctggtactaggagaacgattttaatcacactaacctgtacagaaaattggtgatgcttatacaataaaaaatggtaacacccatagcttgcatacagttacattgcataattacattcggcatgcttgcagagaacccatgacagagtgcttgctgtcaactgtcgcctacaaaggttactgccccaggattcgagatcctgagcttttgatgttctctagaaattctttcctttttggcttgaagaggagattgttgtagatgaaaagccatgcaaccaatatcccgactagttcaaagagaagaggaaggaccgggagcttgtcgatgatctcaatg

SEQ ID NO: 16553 - DNA, 404 bp, Zea mays
  Clone ID: LIB83-013-Q1-E1-A12
cggacgcgtgggggggcgtcgtgacccagttttctccggccgagggcggcgcgaccggccaaccagcgtgagcgcgaccggcgacatgactcgcggcaaccagcgtgaccgcgaccgtgagcgcgcggcggcgcggaagcccaacgccaagaactcccatgacgggctcaccccggagcatcgccgcgagagggacaagaaagctctggaggataatgcgggcaagaaggcgcagcaggcagctgccggcggaaccggtacctccacggacaacagcaagaacacggcaggtggcaagaagtatgaggcagtggcgcgccgccacctctgtacgattaatcgatgccttgagcttgtaacttgttcgcatccttgtaagtgcgatgcgtgttgggtcataaact

SEQ ID NO: 16554 - DNA, 386 bp, Zea mays
  Clone ID: LIB83-013-Q1-E1-A3
cgcacgcgtccgcccacgcatcggcatgtgcttcccttcacgtgagcttatgaggccctgacgttgttgatggacgcctgttacctcctctaagggtgcttcttgccgatgatccatacgctgttcacaaccataacccgaataccatgtcgtcacatgttcatacaggacttttaggtcccactgttgaagcatcagcactctagagacttcttgcgctttgcgcgattgctcgccagcacgttcagagtctaataatggacgatcaatccattctaggaggtgggccgccacatatcactcaactggacgtccaattgagattgcagaagaagttcacgatagttgacatgatgcatcagatcaacaggagaatcatgatgtta

SEQ ID NO: 16555 - DNA, 392 bp, Zea mays
  Clone ID: LIB83-013-Q1-E1-A4
ccgccttcggcgaggcccgcgtgacgatgcgcaagacggcggggaaggccaagccggcggcggcgtccgggagcccgtggtacggccccgaccgcgtgctgtacctgggcccactgtccggcgagccgccgagctacctgacgggcgagttcccgggcgactacggctgggacaccgcggggctgtcggcggacccggagacgttcgccaagaaccgggagctggaggtgatccactcccgctgggccatgctgggcgcgctcggctgcgtcttcccggagctgctcgcccgcaacggcgtcaagttcggcgaggccgtgtggttcaaggccggctcacagatcttcagcgagggtggactggactacctcgggaacccgagcctcatccac

SEQ ID NO: 16556 - DNA, 360 bp, Zea mays
  Clone ID: LIB83-013-Q1-E1-A5
cactgttctcagcttccgctcgctggtgtcccctctctctcaccgatggcttcggctgaggcggtagctcaggtggggacttacttcctgcggaactactataacctgctgcaagagacccccgatgtcttccaccagttctacagcgaagccagcaccatggtccgcgtcgacgacctcacctgcaacaatactgcatcacagagctgtccttcagccattgggaagccgacagcatgtgatggcactggcaccgtgctcgaactgacggtgacgcacgacctgccttgctgtgaggagtatttttgtagtttatatttgtacgatgagtgttcttcctggaaaagaggggaccaatgt

SEQ ID NO: 16557 - DNA, 389 bp, Zea mays
  Clone ID: LIB83-013-Q1-E1-A6
cggacgcgtgggccgacggcaactggatcacattcatgaagttaaggctagacagggtcttacaagaccagttcgacgcagaatcagttgaagaggcattggcttctaaccctgttgagttgaaatttgagaagcctgagaaatggacagctccgtaccctaaatatgggtttggatggtgggaacccttcttgcctccaaagttcagcaatggtacggcatagagataagcagcaatccctatgaggcatgtaagattactcccctgtaagtgatgaatgtaattttaattttgatgatgaggatgtagtacttgaggttgtaccagtacagttagttgaattagttgcacagtttttgtaataccaaataatcagctgttttaattt

SEQ ID NO: 16558 - DNA, 403 bp, Zea mays
  Clone ID: LIB83-013-Q1-E1-A7
attcttttctgcagttagctgtatactctggttgacctcatgcagtcttctcacagtcctctgggcactcctcattgctctatttgcaactgtgctccatgcaagcttcagaacaccaaatctgaaagcacgtctgaatacattcagagaggaattccgggctgtctggcggaattatagtgagctttaaggtctcatttgtttctctcatgttcattgtggtaaggaaaggtgtctagtgcagaaacgtccatgctgtttgtgagttgcactaggagatctagttgaaggtgaaacgccattggacactactacatggattatgggaagtgggatttgggttccgttggccgaatgcgatgttatgccttagcacgtgattcctcaagaacaataaattttc

SEQ ID NO: 16559 - DNA, 397 bp, Zea mays
  Clone ID: LIB83-013-Q1-E1-A8
gtctccgtctccgccgccgccgttgccgctctcgtcccacccctcaccggccgccggtcgccgccggcatctcgcgtaccgcagatttgccgcagaagaatcagatccaaaccccgtatcttctcttcttccccctccttccccattgtccccgccgctgccatggccaccggcggcgccgcccccaccgctttcgatgccgggtccaagaagaagttgctcatctttgactccgaggaggatctctcggtttctctggcgaagtacactgcggagctgtcggagaagttcgcggccgagaggggtgcctttaccgccgtgctctctggcggatccctcatcgaggcactcaggaagctgacggagccgccgtacctggattcagtggactggagca

SEQ ID NO: 16560 - DNA, 415 bp, Zea mays
  Clone ID: LIB83-013-Q1-E1-A9
cggcgacggcgccgcgcacggccagaagaagcccgtcttctccgcgcgccgctcctccatcctcggcgccggcacgggcgccgccgccgtcctcgtcgacctcctcgcccccggcgccgccggggagttccgcgtcgacggctccttcccgcgccgctgctgccgcgtcgtggcctccgccagggcctgggccgcgcccgtcgccaaggaggaggaggaggaggaggaggacgtggtggtggcggacgtcaggcggaaggtggacgaggacgcgcacgtcatgatgggccgggacgtcttcgtgctctgggtgcgcgccgggttcgacgccgccttcgccatggggatcgtgctcgttctcgaccgggtcaccggggacgacgtcgacggcgacctgcggggggccgcctcgggg

SEQ ID NO: 16561 - DNA, 392 bp, Zea mays
  Clone ID: LIB83-013-Q1-E1-B10
cccaagcgtccgctctttacgattctgctgatgacgaacctacaagcattaacaaggaaatcctcggatcaagtgatggcatggttacccaatacagcaacatcagcagagtacagagtatcgaagatcctggaaacactggaacaaatgactttgcgccaattatcgtcgacgaactgacaacaagctcaaatggattagcacgaatgaacgttgaaccattgactgtaagctcaaatgagttcacgccaccgaacgccatgccaatggtagctcgtctagtcgagaatgggtcaaccggatacagcgcacaggacactcacgacgcttctcagaattcagcgcccaaagctgcaaatcacgcgaaccaaactggatctcagaacaacagc

SEQ ID NO: 16562 - DNA, 400 bp, Zea mays
  Clone ID: LIB83-013-Q1-E1-B2
aagacacgtgggtaaaacaacattgtgtctacagtataaaccccagtacatagctgctggttccctttatctggctgcaaagcttcacaatatcaagcttcccttgcatggagcgcatgtttggtggcaccaatttgatgttgcaccaaagcctctggaagccgtcattcatcaaatgatggagcttgcggctttgaaaaagttgatgcctgctcgacccaatccggttaagctgaaggaaactttatgtgaagctaaactgagcttatctaatagcccagactctgtgttgaatcaatcaaacttgttaataagcagctcaagtccggatattggcgagcccagtgacaaaatgcaggtggattcctgccaagacttgagaagcaatcccatgggtgaa

SEQ ID NO: 16563 - DNA, 307 bp, Zea mays
  Clone ID: LIB83-013-Q1-E1-B3
ctcttcatacccgcctcttcacctcaactcacattgtcatggcctcgtcttccttctcttcctctccatctcggcggttggtccacctcacacaccatctcgtctcctcttcttccggcgagctttcctcagtcggcgcccccgccgctggcgcctcagtatccgaccccatggattgcccacgctccactgcctcacaagttcacgcatcggtgctggactgcagcttccaggatcctatgcataggtctctgttcatgctttctgggcactctttgccatcctcttcacgatccggttaggtgtc

SEQ ID NO: 16564 - DNA, 391 bp, Zea mays
  Clone ID: LIB83-013-Q1-E1-B4
gtctggcctcgtcgtcctctggacgacttttctcccgtcttccacaaccccgagtccccaacccaccacggcgttgcggaatccacctgcaactgcaagcccacgaaatcgagccgagccccgacgccaccaaatcgtgtggcctcggagatcgagcagggtctggaagaaccaggggagagaccgtcagaagaggaggaccagcagcaggcaggcggtggtggcgaagtcgtcggcgtcagcggccggggtatctacgatgataacccggtcgaagctggtggagcagctgctcgactaccagatccgatcgcagcacaagcgtgacgttatcggagctatatcatggggcttgttgtgttgttttctgataatatcatcgtgcatgacg

SEQ ID NO: 16565 - DNA, 355 bp, Zea mays
  Clone ID: LIB83-013-Q1-E1-B5
gtctcttatagcaaagcaatagagctatagtagaagaccacgtttggttgaaggccataccctagaagctatttgaaattggagaaaaaggttggctacagttggaccgtcagactgtacataactgaattttgttattcagttctgagaactgagttacagcaggatgcctactttggaattcatttgtcactgattcgtggggttttggttgaacttttccataacatctctagagaccaccataaaaataagttttgtaaagttatgtggacttgggtccacatgaattttgggataacaatgggccaaaaagggaacaactttcatcacacggagtggggctttctaccgt

SEQ ID NO: 16566 - DNA, 412 bp, Zea mays
  Clone ID: LIB83-013-Q1-E1-B6
cggacgcgtggggacgaggagatggagatcgacctcgacctcgacgacatcaacgacgtcttcccggagatgcccggctgtgacctcggccgcggcatggacgacttcctgcaaaccgttgatttctgcgtgtgaattgaaagggagtgtgcccttgatatgttagggttgtttggtttcataaacgagcccctgagagtgtgcttggaaaggggagatgagatatcttgggttttttccccgggcaagttggatctgctcgtgcccaggagatttcctctttgccgaacacaccaccattagcggccggagagaggtaattttggtaggttatattatgtttaaggtatagtgcctaagtgtttgctttgttatttggtaatgcttgtcaaagacattgtagtggacaaat

SEQ ID NO: 16567 - DNA, 380 bp, Zea mays
  Clone ID: LIB83-013-Q1-E1-B7
ggggtgaagcccgtgcagtcaccgggtccgttcctcgccggtatggagccgagataccaatcggtgtccagggaggacatactcggggagcccctaaccaaggaagaggtctccgaactcgtgaaagggagcctcaaatccaaacggcaactcaatatgggcagggatggtttgacacacaatatgttggagaacattcattcacattggaagaggaaaagagtttgcaagataaagtgcaaaggtgtctgtacaatagatatggataatatctgccatcagctagaggaaaaagttggaggaaaagtaatacaccgccaagggggtgtcatatttctttttcgtggtagaaactacaattacaggacccgcccatgttt

SEQ ID NO: 16568 - DNA, 366 bp, Zea mays
  Clone ID: LIB83-013-Q1-E1-B8
accacggctccggtacaacaaaaaaccacgtcacaacatgtttcggcttcgagaaaccttccagaggccgatccttagttctgagccccaaattgatgaacatcaaatacacccaaatgatcaatttgttatcttcgcttctgacggtcaatgggagcacctcagcaatcatgaagcacttgaccttgtccaaagtactcgacacaatggaattgctccgacacgaatgaaagcggccatgcacgaacctgccaagaagaaggagatgagatactcatacctcatcaagatcgatcgtcgtgtgagaaggcaattcgaagacgatatgacggtcctcatggtactccttgagtttaatgccatgac

SEQ ID NO: 16569 - DNA, 184 bp, Zea mays
  Clone ID: LIB83-013-Q1-E1-B9
cccacgcgtccgcccacgcgtccgcccacgcgtccgctagtgtattgaattacatatggtgtttttgttgttttatttatcacttctcctgtattcctatattttatatgtctaagtttttaaggtgatttcatgcaacccttgtacaagcaattgatacaaataaattgcaccttttatgatc

SEQ ID NO: 16570 - DNA, 405 bp, Zea mays
  unsure (1)..(405): unsure at all n locations; Clone ID: LIB83-013-Q1-E1-C1
cggacgcgtgggcttctactcgcactatttctttgccagtggtgccgcacacatcggagcaatgttcaccgcgttcctgtcggtggcgagtgccctgggcaccccgtcgcttttcgctgccatggttctttcattcctctcgaacctcatgggcgggaccacccactacggcatcggctctgctcccgtcttctacggcgccgggtatgtcccattggctcagtggtggggctatgggtttgtcatctccgttgtaaacatcatcatctggctcggggtgggcggcttctggtggaagataatcgggctgtggtgagcagagagcagcacattaactgcgacatcccttttgtttttctgttgtttttttgtcnagtggggggaggaaaactatttcctgaaatt

SEQ ID NO: 16571 - DNA, 405 bp, Zea mays
  Clone ID: LIB83-013-Q1-E1-C10
ggcgaggcggtgtggttcaaggcgggctcccagatcttcagcgagggcgggctggactacctcggcaacccgagcctggtccacgcgcagagcatcctggccatctgggcgtgccaggtggtgctcatgggcgccgtcgaggggtaccgcgtcgccggcggcccgctcggagaggtggtcgacccgctgtaccctggcggcagcttcgacccgctcgggctcgccgacgacccggaggcgttcgccgagctcaaggtgaaggagattaagaacggccgcctcgctatgttctccatgttcggcttcttcgtgcaggctatcgtcaccggcaagggccccctcgagaacctcgccgaccacatcgccgaccccgtcaacaacaacgcctgggcttacgccaccaac

SEQ ID NO: 16572 - DNA, 382 bp, Zea mays
  Clone ID: LIB83-013-Q1-E1-C11
cattacggtgttgcacactttggtacccagtttgctaatagtatacgtttttatgctattttaggggaattgtttcttctgtagagggtcttgttctgttaattggttgtttggtgaagttggtgaccgatttctccacctttttctcgatgcatatcctgagagtttacgttcctagctacgagagctacggacgaatgtggccacacatgcacacgaggatcatcgcggctctgatggtttaccagaccaccatgattggcttcatctccctgaagaagttcgcctaagcctccgttctcgtgcccctgcttccatccagcataatcttcgcctacgtctgccacatgcgcctctacccggcgttcgccaagactcccct

SEQ ID NO: 16573 - DNA, 375 bp, Zea mays
  Clone ID: LIB83-013-Q1-E1-C12
cggaagcgtgggcggacgcgtgggcggacgcgtggggtcgccggctgatttttttttccttcagcagccgcaagctcgagcttcattcttcctctgtgcgctgatcgatccttatcccgccgcccttccctgagatttttcaggcgccaccgcccttgggctcctacaaatctcctctgccggtgctccaattcacgaaatcgcgttcctgtgcttcccagctgagttctagccatggtgccggtcgagttcctccccagcttcttcttctagctcgcccagccgaagttccatggcgctcctctctgccggcgttctccccagccgcgctctggcgtcgacctccgctcggccgcgcgctccctccctgcccag

SEQ ID NO: 16574 - DNA, 212 bp, Zea mays
  Clone ID: LIB83-013-Q1-E1-C4
cggacgcgtgggaaaaacaaaacaaaaaaaaacaataaaaaaaaaaaaaaaaaaacgaaaaacaaataaaaagaatcaaaaaaaaaaaaacaaaaaaaaaaaacaaaagggcagaccgcaaaaaggaagcaaacaattgaatttcgcaggcaagcaaccttggcggtctctcgcggcggctaacttgatctcctcctcggcccgtcgcattc

SEQ ID NO: 16575 - DNA, 287 bp, Zea mays
  Clone ID: LIB83-013-Q1-E1-C5
cagacacatgggcggccgcatgggtcatccactacgtcctatccacggcatcatcgctcaccagcactggaggtctccgagtattcatggcgccttgaccatcggcccgatcatcagcagccatcacaatcgccagccagatagtcgcacaacagcattcacaaagaccctttgatgcctaacaccatacagtcgagtctttcgcccttgtcactccacgactagcatactccctactgagaagattaagcctcagaccccagactactgcattcatccaggaggat

SEQ ID NO: 16576 - DNA, 377 bp, Zea mays
  Clone ID: LIB83-013-Q1-E1-C6
agaatacaaggaagtttcaaatatttatgatcagatgcaaagagctggtctgaaaccagatgttgtgagctattccctgctcatcaaagcttatgggaaagccagaagggaagaagaggcattggcggtttttgaagagatgcttgatgctggagtcaggccgacacgcaaatcatataacattttgcttgatgcatttgcaatatctggattagtagaggaggctaatacagttttcaaggcaatgagaagacacagggttgagcctgacctttgctcttatacaactatggtcttagcttatgtaaatgcatctgaaatgaatggagctgagaaattctttcgtaggattaaagaggatggtctgaagcccaacg

SEQ ID NO: 16577 - DNA, 365 bp, Zea mays
  Clone ID: LIB83-013-Q1-E1-C7
agggaggaattgtacattgatttaccatgtgcaatacagtttccggtctcaataagatcaatactagtttgttgttacaggcagcaggctggccatgcgtgaatcatgaccgatgcagcgcttcaggttcctttacaacacgcatgcatctagctttccacagcaaacaactggcggcggcggcggcagcagcaggtatgctgatgcaccacgtgctagtggaacttgaggctggtgagcacgttgttgttgacggggtcagcgaggtggtcgagcaggttctggaacgggccgacgccggtgacgagcccctggatgaagtaaccgatgatggcgagcatggcgagcctgccgttcttgatctc

SEQ ID NO: 16578 - DNA, 293 bp, Zea mays
  Clone ID: LIB83-013-Q1-E1-C8
gtccacgtacgcctctgacaccgttttgccgtgtggtcatgggtagtctgcaccagggatttcctctgcagggctaccctgcgtatgcactaacagtactttttccaccaatggcttatcctcatcctcgatcggcatatcatcgtccatctgagggataaccaccataatgtgggtaccgtcatccagtttgctacacacctcaaggtggatatcatcatgcacgctactctggcacatcacaacaccgttatggtaacaaccgccacggacgccacgtaggcaacattcag

SEQ ID NO: 16579 - DNA, 399 bp, Zea mays
  Clone ID: LIB83-013-Q1-E1-C9
gacaggtcgtgctcatgggcgccgtcgagggctaccgcatcgccggcggcccgctcggcgaggtcgtcgacccgctctatcccggcggcagcttcgacccgctcggcctcgccgacgaccccgaggccttcgctgagctcaaggtgaaggagctcaagaacggccgcctcgccatgttctccatgttcggattcttcgtccaggccatcgtcaccgggaagggcccgctcgagaacctcgctgaccacattgccgaccccgtcaacaacaacgcttgggcctacgccaccaacttcgtccccggcaagtgagggaggcgccgccggtgacctttaggtgtccggatgcatgtgagcgcacgctggttttcggtttgttccatgaggttaactattgttc

SEQ ID NO: 16580 - DNA, 402 bp, Zea mays
  Clone ID: LIB83-013-Q1-E1-D10
aacatgttatcaatggaaaaccggttgaaattaagagaacgatccctaagggagctgctcctttgaaagatttcaagacgaagaagatttttgttggtggattaccctcagctctaaaagaagatgaattcaaggaattcttttccaagtttgggaaggttgtggagcatgaaatcatccgtgaccatgcaaccaaacggtcacgtggatttggttttatagtctttgatgcagaaaaagcagtacatgatttattacatacaaagggcaatatgattgatctaaatgggtctcaggtggagatcaagaaggcagaaccaaagaaaccctctaatcaaccacctcgttcacttgatagtgagcctaggggccgtccatatgcagacagttatgatggatttg

SEQ ID NO: 16581 - DNA, 160 bp, Zea mays
  Clone ID: LIB83-013-Q1-E1-D12
gcgtccgcacatatgtccgcggacgcgtgggcagacgtgtgggtcgccatgccaagtgcagctggtcatctgaaggagtgctcaagaaccagcaattttcgtgggtgcacgacactctgggagataagcttctgcatttacatgatgcattttgcatgtt

SEQ ID NO: 16582 - DNA, 342 bp, Zea mays
  Clone ID: LIB83-013-Q1-E1-D2
cctttcatcccatttcgtctggccgtctaatccgttggacggcccgttctgtgcgtggtagcgctatgatctgctctgaaggagttttgagaagcatacatggatccgaaagttgctcctgtcaagaatgttgatgccaaggtcaaagtcttggatgtggccaaggtcgtcatgtttgaggcaggcaaggagaagagcaaggtcattcgtacatctgtcgcagttcaccagatcacaatactaaatatcgccaaggatacgaagttatcacgcttcaatactactgtcatcaacatactcgatcagtatcatatcctcaaatatcctctcaacacataatct

SEQ ID NO: 16583 - DNA, 390 bp, Zea mays
  Clone ID: LIB83-013-Q1-E1-D3
gctggtcgcaggagcgctactggttggtttcgtaggggggtttggggcggccggatacgtgtacaaggaccagatcaacactttcctcacgcagttctcagggttcattgacggctatggtccagccggatatgctctgttcgtacttgtatatgcaggattggaggttctcgctattcccgcaatacctttaaccatgtcagctggtctattatttggtagtgtgaccggtacaattattgtttcaatcagtggaacactagctgcagcggtggccttccttattgctagatacttcgccagagagagaattcttaaattggttgaaggaaataagaagtttctggcaattgataaagcaataggtgaaaatggattcaaggttgtcac

SEQ ID NO: 16584 - DNA, 380 bp, Zea mays
  Clone ID: LIB83-013-Q1-E1-D4
ggtcgctccattattccagtggcaaggaaacagcagagtttctgatcgaacccgagatcaccctgaagctgatgatggccgcaaactacctggacacttgatgaggagcctgagggatctaaccctaggaaccgtttggttgtgaaatttgaaaaggtaatgtaaacgttatccgataacactgtaaattttaaaaagtaagctattacttggattgtttggttcagcgtaagagattatgttgtggcttaaacaaacacgctccaacgtaatcagttactgttgtaatcaaaaacaaaaaaaacaacaaaaaactaaaaacaaatcgaacaaagaaaaaaggataaaagaaaacattttcgaaaaaaaaaaaggggggc

SEQ ID NO: 16585 - DNA, 391 bp, Zea mays
  Clone ID: LIB83-013-Q1-E1-D5
aagtcaactgctgaacatgcaatacaacatccattcttcaatgtgtgcaattgggtagcaaaagctgtacatgatgcttaccatacagaatcactccgccctaatgctgagccaagattggaactgaacctgtgggatctcagcacagaacctgatgattgtgtccctgatttatctctcagtctcaatccacgtttttctggaacagacattggtaagcatgttccacgacatacataagatgaattactcctgtacccgggatatgagaatacccccgtaaagtccggtttttggcctctggtgccatccgatcatcccgttggtgatattccggccataccatccttgcaacaggcctacatggctgacagcccaagggcatattctg

SEQ ID NO: 16586 - DNA, 421 bp, Zea mays
  Clone ID: LIB83-013-Q1-E1-D6
atccggtggtgctgatgttctgggcggactggaaccagccaagcaaggccacgtactgggatctggccatcgctaaaaaggatgaggccgtattctgccagctggactttgataagtttaaagatgtcgtagagaagttcagagtgaaggctctgccgacgttcctcctgatcaaggagggcgaggagcagcgcagggtcgtcggtgccaaggtcgaggagctcaacatggcattatcagatatcggataatctaggcagctatagcgctcacattcgaacttcatcaaattattctaataaattaataagctggaaataagtcttaaaaatacaaatggctaattaatgcattttcgatttacaaagattgaaattcaagaaaatgtgtattaattatatcatatacaactactacacat

SEQ ID NO: 16587 - DNA, 142 bp, Zea mays
  Clone ID: LIB83-013-Q1-E1-D7
atgaacacctggttttcagacagccgccggtgtttctgtttgacctccttgtaattttaaatatatatctagacattttcgcaaaacaaatcacaaggaaaaaaaaaagaaaaaagacaaaaaaaaaaaaaacagatggtga

SEQ ID NO: 16588 - DNA, 366 bp, Zea mays
  Clone ID: LIB83-013-Q1-E1-D8
cccacgcgtccggaacgataagctgattgaattacagagggtgaccagagatgagaattctcggctgagagagatgctgaagcatgcggtgggcgaagctaatgtagcaagagaatcgctggagattgccagagtggagaattctcgccttaacgaagagatgtttaagaaagagagtaccttgcagagtatcaaccaagaatatgaatccctcaagatcagcgaggcagccgcacagagtagcattaaagaattgaaggatatgattgatgctatgttcagttctgagtcgaccaaaacgtcagcagaagcatcacctcgtgaggccaagggaagcaagatgaaggaaacttctgtggcagcaga

SEQ ID NO: 16589 - DNA, 394 bp, Zea mays
  Clone ID: LIB83-013-Q1-E1-D9
aaagagttggttgaacggatgggtcttggaaagtcatcctcaaatgttgaacctcctgaatttggtgctgcagctgatggagatgctgaccgcaacatgattctgggtaaaagattctttgtgacaccatcggactctgttgccattatagcggccaatgctgttcaatcaattccttactttgcttctggcctgaagggagttgccaggagcatgccaacatcagctgcccttgatgttgttgcaaagaatttgaatctcaagttctttgaggtgcctactgggtggaaattttttgggaatttgatggatgctggaatgtgctcaatctgtggtgaagaaagctttggcactgggtctgaccacattcgtgagaaagatggcatctgggctg

SEQ ID NO: 16590 - DNA, 327 bp, Zea mays
  Clone ID: LIB83-013-Q1-E1-E10
gggtcggtccacgcgtccgaccaagcgtccgcgaacgggatatgagctgtcagatatggatatactgtttgctgaggggattacatcctcagatggggtagcatcaactgacttctctttccctcagctgtcgttgggtggactgggtgttgatgacctcgatgcacaagacactttgctaaggtagcagttgatcaggatatacagtagaggtttgcatgggaactgcaaatgggtgcacatgttcgatgacgttaggcttgttagcttctgtgttgctgctagcgactacgatgagtactccgaagatgcaaacggtatcattgt

SEQ ID NO: 16591 - DNA, 370 bp, Zea mays
  Clone ID: LIB83-013-Q1-E1-E11
cccacgcgtccgctgcggcgtagccgtcgcttggacgcggtccagagcggttgcaccgcgctgtccatcgtcaagcagggggacctcatggtcgtcgccaacgtcggcgactcccgagccgtgctgggcaccacgtacggcgatggcaccatcgtggccgtccagctcaccgtcgacctgaagcccaatctgccacaggagaaggagcgtatccggcggtgcaacggccaggtgtactgcctcgccgatgagcccggggtgcaccgcgtgtggcagcccagccgggagtcgccggggctcgccatgtcacgcgcgttcggcgactactgcgtcaaggactgcggcgtcatctcgacgccggaagtgacgc

SEQ ID NO: 16592 - DNA, 400 bp, Zea mays
  Clone ID: LIB83-013-Q1-E1-E2
cacacgcgtccgcccacgcgtccgaaagcttaaacgagagaactacaaggcactgcctgcatcggttccatgttaatgcttcgcccgatgacgacgacttccgctcgtcgcgtaacatagcgatcagtttgttcaagcggtacaagaatgtcattgaccgaggaggtggagaaaacctaaatgagtttgtcagtgctggagtgaccgcttacgcactagggtgtacagatgaggggcttagaaaggaacttatggatattgaagattctggtctggagattgaaggcttacggtccttggggggcaccagcctgaagttcaaagtccactcctttgagattcgtgagtgcattctgtggctcagtaaagtgttcgtcacaatactgtgcacaccacaact

SEQ ID NO: 16593 - DNA, 369 bp, Zea mays
  Clone ID: LIB83-013-Q1-E1-E4
ctggggacaagctcctgtcggattcatgcacctacaaggagctcgagaacggcgtcctgtgggaggtcaagggaaagtgggtcacccaaggtcctgttgatgtggacattggtgccaatccatccgccgagggtggtgaggacgaaagcgttgatgacacagctgtgaaggtggttgatattgttgacacattccgtctacaggagcaacctccttttgacaagaaatcatttgtgtcatacatcaagagatacatcaagaatctcactgctgtgttggagccagataaagcggctgagttcacaaatggtgtcgagggagcaaccaagtttctccttaccaagctgaaggacctccaatttggtgttg

SEQ ID NO: 16594 - DNA, 409 bp, Zea mays
  Clone ID: LIB83-013-Q1-E1-E5
gtgtctgcggtcgccgtggaggcgccggagctcgacttgggccggaatgccgtggacttgagccttctcgtgaaggagtcctcggaaaagagccagcaaggggagcgtgtcaggcagtggcacatggcgttcccactagccggtaaggccaagggcggcgagctcgtcgtcaagctggcgttccagatcatggatgacggaggcgtcgggctgtacagccaaccgcccgttgcagcttcaggcaaaactagctcctcttcgtcctcctccttgtttgcacggaaacatagcaagtcgtcgttcagcatcccgagccccaaggtgatgcgctcggagccggcgctgataccatccatgggagcgccatcggtggacttgctaggaatcgacgatttcaagctcgattagc

SEQ ID NO: 16595 - DNA, 416 bp, Zea mays
  Clone ID: LIB83-013-Q1-E1-E6
cccacgcgtccgcggacgcgtgggggagcacgtggcagtgtttagttcgacttttgacaagtaagttgtggttccaggtctcatcaactgcacaatgaaataggcacaggatactttatgtgtcagctacgtgcaatttggtgcaagactagcacaggaacatggagtttcttcagtgttgtccgtatacctcttccatctggtccttgacatcacagcagaggaccatccattggactgtcatgtttttgcgacttcgttgagcagctgtctgttgatgtttcactgacagtctcaggctggtgcagagccaagtgcttaacatccatattgctcctgtgatgagttatgaccatggttccaagaaccatctcagcaatattgccatagttctgacacaagtgtggggggagcct

SEQ ID NO: 16596 - DNA, 423 bp, Zea mays
  Clone ID: LIB83-013-Q1-E1-E8
cccacgcgtccgagttagcaagggtcgtgctgtcgacaagctgattcaagcactggccaacaacaacgggaaggcacaggatttcctgatgtgcgtcggcaacgacagatctgacgaggacatgttcgaatgcatcaacggtatggcctccaacgatgtctcatcgaccacagtaccggaggtgtttgcctgttcggtcggccagaagcccagcaaagcaaaatactatgtggacgacaccagcgaagtgatcagattgctcagggatgcaacccgcttctcatcgtcgcagcggagggaggacgtcaacgccagccgcgggcgtgtgaccttcagagacgcactcgattacgtggactaggcaccagcagcaattcttagttactcgaaatgattagctgcggagcttgtaaattccgctgt

SEQ ID NO: 16597 - DNA, 377 bp, Zea mays
  Clone ID: LIB83-013-Q1-E1-E9
cataagcatcatgctcctgacgaagcagctagagccaggtaccaaaagaaggtttctaacataatcgatgacgttcttgaatggtctccgaagttagctatttctggaatgattgagaagcacactggggctaacattacagaagaaagcaattacaccaccagggcggcgagtagtcacatgcctccatccaccgaagggaaagcttcagaagatatggacgttgatggggataccgaggctagcttagatgaaacccaagataatgaatatgctgatgatacaagatcaagcggagcttaaaatcagagttttttttgtttgagcaatctttgttgttgtgaatctgcagaattatatagatagcttactgctgg

SEQ ID NO: 16598 - DNA, 352 bp, Zea mays
  Clone ID: LIB83-013-Q1-E1-F1
aacacgcgtccgatgcttgcagctagttctctagtgaacagcaacctcgcttgctcaacaaggatatcatcctgttcagacttcacatatagccactcctggcgtctcatacatgccatgatactccatcagatgcgtgctgtgagctcaagacgtataagttgtgctgccactaaacctgcaaagactcctgctgaagaacaatggacagttatgcggtaactgctatcataaacgcgggtacgaagtgtcgatgtgaacgaagcactgcgccttcataaggaatacaagtttgtcattcgtggtgtcaggccataagcacagtttaaagacgctcatccacctggcgcca

SEQ ID NO: 16599 - DNA, 397 bp, Zea mays
  Clone ID: LIB83-013-Q1-E1-F10
ccccaacgaagtgcgagcgacccacgtccacacgacacgaaccaccaccaccaaccagcagccgcaccacgcacccagcgcaaagcgatggcgtcgctcaccatgatggcgtccttcgccgccgtggcggtggccgcgccctcgcgccgcggcaccttcgccgtggtcaggtccgccaaggtcgaccgctgccaggagcccgccacgctagcagcaaccgaggccaggcccgccgccgacggacgccgcgccgtcatgctcgcggctgctgcggcggccgtggcagccatcggcggcgccggcgccgccatggcgggccccaagaacgggacccccgaggcgaagaagaagtacgcggccatctgcgtcaccatgcccaccgccaaggtctgccaca

SEQ ID NO: 16600 - DNA, 392 bp, Zea mays
  Clone ID: LIB83-013-Q1-E1-F12
ggcaactttgccaaggtttaccatgctcgtaacacggcgacttcggaaagtgtcgcgatcaaagtgattgataaggagaaggttatgaaggttggtctcattgatcaaatccagcgagaaatttctgtgatgaagcttgttaggcatccaaacatcgtacagctctatgaggtcatggccaccaaaaccaaaatatactttgtgctggaacatgttaaaggtggagagctgttcaacaagattcagcgaggaaggctcaaggaagacgcagcgaggaagtacttccagcagttgatctgtgcggtggacttctgccacagcaggggtgtctatcatcgagatttgaagccagaaaatcttttgctcgatgagaatagcaacctgaacgtatc

SEQ ID NO: 16601 - DNA, 415 bp, Zea mays
  Clone ID: LIB83-013-Q1-E1-F2
accacgcgtccgcagattcagatcagatcgtagcagccaaggattccgcgctccgggggtgccatgaagctgaagctcctctctccctgccttctcgtcctcgccttctttgccaccgcggcgtacgcggcgtcggcgtcggcgtcgcgcgcggcggccgtcgtcaggggcgcgggcgccccgtcgcagtcggagttggagtcggacccggagaaccagtgcgtgtacacggtgtacgtgcggacggggtccatctggaagggcggcacggactcgaccatcggcgtgacgctgctgggccccgacggcacgggcatccggatccgggacctggcggggtggggcggcctcatgggcgccggccacgactactacgagcgcgggaacctggacatcctcaaccggcggggggcct

SEQ ID NO: 16602 - DNA, 398 bp, Zea mays
  Clone ID: LIB83-013-Q1-E1-F4
cgcgcttgtttgttcgcgtcttctccctgtagggaactccgttacccggccccggctgtgcgtggcgtcagcacgccccgcgggcaggagggtgaggctgctgagcgtgaggtgcgagcagggagccaagggcggtggcgggctggacgtgtggctgagccgcggggcgatgctgggcttcgtcggagcggtggccgtggagctgaccaccgggaaaggcgtgcttcagaatgtgggattgaccgcgccggtgccgacgctggcgctggcgctcaccggcgcggtcggcgtcctcacggccttcctcatcttccagtccgggacgcgggactgatgggtgaattgtcaaagctcccaaaaggacatgcataaagtctgtcagagtcctgtgccgtgta

SEQ ID NO: 16603 - DNA, 410 bp, Zea mays
  Clone ID: LIB83-013-Q1-E1-F5
accacgcgtccgccagcactctaactcaggggacacgatcgccatggccgccacatcgaccgccgccgccgtgctgtccccgccgtccgtggccgggctccgcctggcgccgtctcccggccgggcgcgcgtgtcgttccgcgcggcgccggcgccggcgcggcggtccgtggcggcgcgcgcggagctgagctcggcgctggtgatcagcctgagcacgggcgtgtcgctcttcctgggccgcttcgtcttcttcaacttccagcgggagaacgtggcgaagcatgtgcccgcgcagaacggcaagacgcacttcgacgccggcgacgagcgcgccaaggagttcgcggccctgctcaagtccaacgaccccgtgggcttcaaactcgtcgaagtcctcccccgggggg

SEQ ID NO: 16604 - DNA, 400 bp, Zea mays
  Clone ID: LIB83-013-Q1-E1-F6
cggcggcccgcccagggtcaggctcaccggcctgggggcgtccatggaggcgctcgaggcgacggggaagcgcctctccgacttcgccgacacgctcggcctgcccttcgagttctgcgccgtcgacgagaaggtcggcaacgttgacccgcagaagctgggcgtcacgcggcgggaggccgtcgccgtccactggctgcaccactcgctttacgacgtgaccggctccgactccaacacgctccggctcatccaaaggctggcccccaaggtggtgacgatggtggagcaggacctgagccagtcggggtcgttcctggcgcgcttcgtggacgccatccactactactcggcgctgttcgactcgctggacgcgagctacggcgaggacagccccgag

SEQ ID NO: 16605 - DNA, 402 bp, Zea mays
  Clone ID: LIB83-013-Q1-E1-F7
caaatcagagagacaggaaaagaaaaaagaattttgatcaaatcaatagaaggaaggatcccttacctgatttgaatttcatcctcctttaaataggatatgctctaagtcttcccatactttcctataatgactgcaacgattttctccattttgcgaattcctattttatttgaagtatattactatcatatacattatttaaatcgatccactttaaataaaatagaaaaaatcgaaagaaaaaaaaaaagaaagagtaaataataaaacaggatattctgtttcataattctgaaatagagttcttttttttagtattactcctcattaggatgtatatattaatcatcctattttaatatatattaatcatcctattttaattaggttctaatccaa

SEQ ID NO: 16606 - DNA, 396 bp, Zea mays
  Clone ID: LIB83-013-Q1-E1-F9
gtctgggagatcccggacttcttcgggtgaagaaaatcaccatgacatccagacagtcttgaccaacggtgacacttcttccaatggagctgacaattcaggtcccaccaaggatactgagtagctgaactgcagcttgctgcatcgctaaccacaaaggcccaagttattactttttgcagacctattttcagttctagcccctcccttcccatttcgattttgtttgttaagtcctcccgatctgtatttattaacttgcatgatgcgggtcaccgaagacttaggctgctgcagaagttttgtctctggcgggaagctatatgcaagagggtggtaccggttcgttccccagaatctatgtgcttgttaacctgaaggccgagaaaggcgaaa

SEQ ID NO: 16607 - DNA, 379 bp, Zea mays
  Clone ID: LIB83-013-Q1-E1-G2
cccacacgtccgctatgccattttattcattgcttatttgacatggcttatatacaaatttacaaattttctactctactcccaccattccaaattgcaagatgttttagcttttctagacatcttttgctatgtacttagatatacactatatttaaatacatagtaaaagcaacgtagcaggaaaaaccaacaatttggaacggagggagtatatgtttttcatgtccagctgtttatcttctattaagctcagtcataacactgtttgtacgagctcccaatcactccacaaatctgtaaatgagcctgggctagttttccttctgactgaccttgatttctccttagacatgcagatgtgactgtttgcgttttt

SEQ ID NO: 16608 - DNA, 388 bp, Zea mays
  Clone ID: LIB83-013-Q1-E1-G4
acagcacagagtgaggtaagcatccgaaaaaagctgtgatctgatcgacatggccgccgccaccatggctctcacctcccgcgcgctcgtcggcaagccggcgaccagcaccagggacgtcttcggcgaggggcgcatcaccatgcgcaagactgctggcaagcccaagccagcggcgtccggcagcccctggtacggggccgaccgcgtcctgtacctgggcccgctgtccggccagcccccaagctacctgaccggcgagttccccggcgactacggctgggacaccgcggggctgtccgccgacccggagactttcgccaagaaccgcgagctggaggtgatccactgccgctgggccatgctgggcgcgctcgggtgcgtgttc

SEQ ID NO: 16609 - DNA, 377 bp, Zea mays
  Clone ID: LIB83-013-Q1-E1-G5
cccacgcgtccgggggaatggggggacgatgaggaggtggtggcggcgaagaaaccgagcgggaagaccgaagaggagaaggtagcggaggcggcggagatcggctacaaggtgttgggaccgctcgaggctgacgataaacccttcaagccctacgagcccgtcttcgccgtcgtacagatcggctcgcaccaattcaaggtgagcaatggcgactccatcttcacggagaggttgaagttctgtgatgtgaatgacaagttggtcttaaaccgagttctcatgcttggttcacaagctcaaacagttattgggaggccaatactacctgatgctgctgttcatgctgttgtagaagaacatgccttaaattccaa

SEQ ID NO: 16610 - DNA, 106 bp, Zea mays
  Clone ID: LIB83-013-Q1-E1-G6
cagaggctcgtaagaatgcacaggcagctatcatctcagtggtatgcaagtcgcgacgactgatcacagctcacgacctctccctcctcaggctacgtgacaatgc

SEQ ID NO: 16611 - DNA, 408 bp, Zea mays
  Clone ID: LIB83-013-Q1-E1-G7
cccacgcgtccgcccacgcgtccgctgatgaagaagtgagaaatgccacagggtattcaaatgtcatggtggctgaacatccactgaagctcagtagttcatatgccatgttaaagggaaattcaaacaataggggtcttcatggtgaacccttggcaacttcctaccacaagaagtttcttggaactgttgattacctgtggcacactcatggaattgaatgctccagagttttggacacgttacctattagtgttttgaagagaacgaggggtcttccaaccagggaaattggcagtgatcatttgcccattgttgctgaatttgctttcacggaatcagttgaagatgattccgatgaagatgatgaatctgagcaagatgacgaatctaagaaatgagcgaaac

SEQ ID NO: 16612 - DNA, 379 bp, Zea mays
  Clone ID: LIB83-013-Q1-E1-G8
cccacgcgtccgggagaatcgtcgaatgagagcaattgtttgtctttgccatggttatggagacacatgtaccttttttcttgatggagttgcgaggaagattgcttcagctggatatggagtatttgcactggactaccctggctttggtctttcagaaggacttcatggatatattccaagttttgatacacttgttgatgatgtagctgaacacttctctaaggtcaaaggaaatcctgaatatagaggcctaccgagctttctgtttggccaatctatgggtggagcagttgcattgaaggttcacttcaagcaaccaaatgaatggaatggtgcaatactggtggcaccgatgtgcaagatagcagacgatgtg

SEQ ID NO: 16613 - DNA, 395 bp, Zea mays
  Clone ID: LIB83-013-Q1-E1-G9
cagaaatccatcgacgaacaactgagaagagctgcgcctgcgcctgcgcctgcgggaaagggagaacatggtggggaagaagaggggtgttatctccccgctggaccatctcgctgggctgctggaggtgcgcgtggtgaggggagtggacctcgccatccgcgacctccgatccagcgacccctacgtcgtccttcgcatcggcaaggcgcagaaagtgaagacgcgagtggtcaagaagagcatcaatccggaatggaacgaaaaactcaccctctctattgaagaccctgccgttcctattagactggaagtatttgacaaggacactttcgttgatgatgcaatgggtaacgcggagctggacatccgcccgttagtcgagattgtgaaga

SEQ ID NO: 16614 - DNA, 431 bp, Zea mays
  Clone ID: LIB83-013-Q1-E1-H1
tcgcgggtcgacgcaagcctctacagtgagcccgatcagcatcgaaccagcacatcgcaagacaagcagcagcagccaccactgccatcacatggagtacgccgccgtcggctacggctacgggtacgggtacgacgagcgccaggagccggcggagtccgcggacggcggcggcggcggcgacgacgagtacgcgacggtgctgtcggcgccacccaagcggccggcggggcggaccaagttccgggagacgcggcaccccgtgtaccgcggcgtgcggcggcgcgggcccgcggggcgctgggtgtgcgaggtccgcgagcccaacaagaagtcgcgcatctggctcggcaccttcgccacccccgatgccgccgcgcgcgcgcacgacgtggccgcgctggccctgcggggccgcgccccgtgcctca

SEQ ID NO: 16615 - DNA, 389 bp, Zea mays
  Clone ID: LIB83-013-Q1-E1-H10
cacaaacgtccgcggacgcgtgggttttttttttttttccaaaatgcatcaatatataagtaccaaaaaagtgtcgcaagcacagtctgcacacatcatacaacacagatcaaactcaaacagcactacagaaattcgtatgctgcgtctgcatcactggatgaagcgcaaagctagcaattcggcttactcccatcaagaccaaacaactaagcagccatacgcaacgtaatgcacaggtggcaaactggtgctcacacccacaagcgctgcccccctccggagaaactcgaaccggttttgctaccattccctactaacatggacctcgaatcacttgcatctagtgcttcatgtctttcccaagacccctgggtactttgctcaga

SEQ ID NO: 16616 - DNA, 393 bp, Zea mays
  Clone ID: LIB83-013-Q1-E1-H11
cccacgcgtccgcacgcatactgcatacacaacacagagcatcagaaggagctgcgatctgatcgacatggctgccgccaccatggctatcacctcccgcgcgctcatcggcaagccggcggctggcacgagggacgtcttcggcgagggccgcatcaccatgcgcaagaccgccgccaagcccaagccggcggcgtccggcagcccctggtacggtgccgaccgcgtcctgtacctgggcccgctgtccggctcgcccccgagctacctgaccggcgagttccccggcgactacgggtgggacaccgcggggctgtcggcggacccggagaccttcgccaagaaccgcgagctggaggtgatccactgccgctgggccatgctcggcgcgct

SEQ ID NO: 16617 - DNA, 415 bp, Zea mays
  Clone ID: LIB83-013-Q1-E1-H2
gggtcgagcacgcgtccgggcttattgatcatgccgtcttcgctcgctgaccaccaccgtctcgctcgtcgagcatatagccatgccatggtacgcacatgctcaaagggatagataggtccagtgcaagcgcgcaggcatcgtcatccacggagggtggtggcgcgtgtgccacatccatgcgatgccggttcacgttgtcgctcctcgccgtgccggcggtggccgctgggttcctgcatgcgttccagttcgcgttcctgctgtgggccttcaacctggcgctgccgctggcgcgccacctgccggacgcgtgcatcgcgttccgctgggtcgcgtccttgtacggagccgaactgcggaggtacgctggcgccgccgtccgggccgccatgcccctgtcttagaccccgaa

SEQ ID NO: 16618 - DNA, 314 bp, Zea mays
  Clone ID: LIB83-013-Q1-E1-H4
acgctgtgcaatgcgtgcggcgtccgctacaagtcgggccggctcctgcccgagtaccgcccggcgtgcagccccaccttcgtgagcagcatccactccaactcccatcgcaaggtcctcgagatgcgccgcaagaaggcgggcgacatggtcgccaccgccgcgccggccgtggcgtcgttctgagctgcactcgctgtcagcaaggacgctggccacccagcggtggctgtacattttttttttcttgccataatggccctgtaccgtacctgaactctcctcccctcactcatcctagtgtggtcgttgta

SEQ ID NO: 16619 - DNA, 365 bp, Zea mays
  unsure (1)..(365): unsure at all n locations; Clone ID: LIB83-013-Q1-E1-H5
cgcgccatcgtctcagtgtcacagcaggaagccgcgctcccgcccgccgtgccgcacgcccgccagccgttagctgctcccaacagcggcgggatcagggcttgcgatttggcagacgcgagtccccccacccccccggccgcttacttcatgcctccatggatccggtcgcggacccgtcgccgtcgcggcggtccctgaagcggaggccgccggcgcggtcgccggagctgtcgcccaagtcgggtccgggggcaggagaggcggcggcggaggggctgatccggcgggtagaggagctggaggcggcggcggcgcggctgcgcggggagaaggangcggcggaggacgcggcgcggggcctg

SEQ ID NO: 16620 - DNA, 371 bp, Zea mays
  Clone ID: LIB83-013-Q1-E1-H6
aagaaggagacacacaatcgtcgcctgcttaaccagagcgacaatgcccaagctcaggctcatcatcaccgttattcttgtggtgtctctactgttcagtggtgtgtcttcaggacaaactgcagctacacaagccagcgatgcagatctttctgaagcggttgaggttgagagacgcagtgggaaggttctgacgtacgttcaggactacgactacggcgggtccaaccccaaacatgacccacgcacgaagccagggagcggacaccctccataggtagccaaggataaacgtccggtgacgctccagccactggactctgctggtacctaactagtcttgctgagttgttcctgtaatgagtagaaag

SEQ ID NO: 16621 - DNA, 223 bp, Zea mays
  Clone ID: LIB83-014-Q1-E1-A10
caatgggctacgagaaggtcctcttcacaaccatagcattggaattcgaagatgttgcacatgaaacaccccgcgaccccctcgagagtatgttgaagatgtctgtaaatatgtcaagtgtgtagattcaagtttccctgaaactttgaggtataaccaaggacatgtaattggtaaattgtttgtattcttcgttgacatgcacaagcagtttgtggtcaaa

SEQ ID NO: 16622 - DNA, 415 bp, Zea mays
  Clone ID: LIB83-014-Q1-E1-A11
cactaacatcatgcatcctttgagtgaggcaatgactttgctgtcaacttctcacgatgcgcttccacaaatctattttgttactgatgggtcagttgatgatgaacggaatatctgccattcattgaaaactcaacttattaaaagtggatctaagtctcctcggatttctacttttgggctacgttcatattgcaaccactatttcttgaggatgttggcatcaattggtaagggtcactatgctgctgcatttgatacaggatcaattgagggtcgaatgcttcaatggttccagaaagcttcaagcactatagtgtcaaatgtttccattgatgccataaagcatattcaagattttgaagtggattctgtatatattccagacatttcagcaaaatatccattgtgtgtt

SEQ ID NO: 16623 - DNA, 381 bp, Zea mays
  Clone ID: LIB83-014-Q1-E1-A4
aaaacaaacttgaggctcttctgcaggttcttgagccaagcttggcaaagggaaacaaagttatggtgttctgtaatactttaaattcaagtcgtgcagtggatcattttttaactgaaaatcatatatccactgttaactatcatggagaggttccagctgaagagagagttgagaacctgaacaagttccgcaatgaagagggggattgtccaacattagtatgcactgatctggcagctagaggcctggacctggatgttgaccatgtcatcatgtttgacttcccatcgaattctattgattaccttcacagaaccgggagaactgcacgcatgggagccaaagggaaagttacaagcattgtggctaagaaagacg

SEQ ID NO: 16624 - DNA, 143 bp, Zea mays
  Clone ID: LIB83-014-Q1-E1-A5
cccacgcttccggtgtgtgtgcgtgctgggcgtgatgggtggagtgggccactgtaaccgggatacatatacactgtcttgtggagggggaaagggaatgcataatgggaattatcaatataattcttctcgttcctttcatc

SEQ ID NO: 16625 - DNA, 375 bp, Zea mays
  Clone ID: LIB83-014-Q1-E1-A6
gtccaagcagtccctctcctacctcgatggcacgctgcccggcgactatggcttcgacccgctgggcctctcggacccggagggcaccgggggcttcatcgagcccaagtggctggcctacggcgaggtgatcaacggccgctacgccatgctgggcgcggtgggcgccatcgccccggagatcttcggcacgatgggcatcatcccgccggagaccgcgctgccgtggttcaagacgggcgtcatcccgcccgcgggcacctacaactactggaccgactcctacacgctcttcgtcttcaacatggcgctcatgggcttcgccgagcagcgccgcctccaggactgggtaaagccggggtccatggggaagca

SEQ ID NO: 16626 - DNA, 409 bp, Zea mays
  Clone ID: LIB83-014-Q1-E1-A7
ggaccctgtcagcctttctggccagctcgttgacagcttctcggaggcggtatatagcaaaaagcggacgccttctggtttctgcatggacctgtggcattgaagcaccacaagcacctaccgtttgctttgtagggagcacacattcgggcccattcttttgttgcagatcgttgcattgattcttcattggcaatttcgctgaagtatttgacttgcacatcttcattgaaacttaacttttcaatgacagtagtttaagttaatgggcaatcacttttttcttttttccgttctttacatttgctccatagtaggttaccgtgctatcatctgtaccgtccatgttaaccttagagcatcaatgagccgcatcgttcggtcagcctgaggcatcgtgggttttgtg

SEQ ID NO: 16627 - DNA, 387 bp, Zea mays
  Clone ID: LIB83-014-Q1-E1-A8
gaaaagatcaaatcagcattagaagctgagaaggaaaaaatatcagaaggaagagaagacggcgatggaggaggagatggagaagctgaggcggcagcaagcagaggccgcgcgcatggagaaggagaaggaacgggagaagagagctaagcagcagcaacaggttgctatgcccggcctgaagaagggtgcgacttatctgaggcccaagagaatgggtctgtacataagacctgatataacttaactgtctccggtgattttgttactacgctgagggaacttgtaatgtgtagcctgctcaagcagcatgtaaaacaacacgtcaatgtgaatgtatacaacatcgacatgtgaaaaaatgaaaagaaaaatagagtgttgtcg

SEQ ID NO: 16628 - DNA, 418 bp, Zea mays
  Clone ID: LIB83-014-Q1-E1-A9
cccacgcgtccgcccacgcgtccggtgacgatgcgcaagacggcggggaaggccaagccggcggcggcgtccgggagcccgtggtacggccccgaccgcgtgctgtacctgggcccactgtccggcgagccgccgagctacctgacgggcgagttcccgggcgactacggctgggacaccgcggggctgtcggcggacccggagacgttcgccaagaaccgggagctggaggtgatccactcccgctgggccatgctgggcgcgctcggctgcgtcttcccggagctgctcgcccgcaacggcgtcaagttcggcgaagccgtgtggttcaaggccggctcccagatcgtcagcgatggtggactggactacctcgggaatccgagcctcagccacgcgcagagcatcctcggcatct

SEQ ID NO: 16629 - DNA, 347 bp, Zea mays
  Clone ID: LIB83-014-Q1-E1-B1
cacacgcatccgcggacgcgtgcgcggacgcctgggctgacgcgtcgctggtgggaagtacagcgttgcctggttactgtcggaggagctgcaatgtgtgctagggtcaggacgtgagagtagtagtatttgttagtgcatacgacttgtctccatagtctgttgttggtctcctacatctcgcagtacagaaatactcccatgctataggttatgccgatggaggtgcacttagaatcagccgactacttggtcgattgatttactacattgcctggctctgccatctcataagttgtaccgggagcttacaacatctctgatccgttgtcatctgtaagattttc

SEQ ID NO: 16630 - DNA, 407 bp, Zea mays
  Clone ID: LIB83-014-Q1-E1-B10
aaaactctagctatggcgcatgtccaattcacagattgcacgaccactgccaaggatatgcatattttctggtctaactggcgaggagatgatgatgttcatcaacgccttcccagaaaccgggctggaagcatctgcctttgctgcgcttgtccctaacagtgcagataatgttctcggcgaagtgatcgaggaaataatgggagaccatgagatgctgacaggaaaagactccagatgagaagaatttgaagcacggacatgcctatcatgaaaattgtcactttgcattctgatatatggcatctaaatctgattcaaattgctgcaacaggaagctgggtatggaaaagactggttaagatagtgttgcacaagaaacatcagtttaatttttcctctgataa

SEQ ID NO: 16631 - DNA, 385 bp, Zea mays
  Clone ID: LIB83-014-Q1-E1-B11
gcggtggcgataaggaagcaccttgagaggaacaggaaggacaaagactctaaattcaggctcattcttgtggagagcaggatccaccgccttgcccgctactacaagcgcacaaagaagcttccacccacctggaagtatgagtcaaccacagcgagcactctggtggcctaagtgtggtatcctccgacagcttgttctagatatgaatttgtgtaatgcttattatggctcgagccggttaaatggacaacggacctcatctttttttatgtttaccttgagaatcccgtaaaccattttgggtttctgaattgtctgttaaacgtaacatgcatatgttttgaagcctagggtgagcttttacttcaccatcactaaggaa

SEQ ID NO: 16632 - DNA, 393 bp, Zea mays
  Clone ID: LIB83-014-Q1-E1-B12
aaagttcgagcctgagctgccccagtggaagagctccgccatcgccgacctcggcgtgggcaccgagaacaagatcgccatgcacttcgacagggtcttttggcccaacgtcgaggtgctgggaatggtcgggccgacgcccaaagcctgtgggtacttcctgaacctgcacaaagccaccggcaatccggtcctcgtgtacatggccgccggaaggttcgcccaggaggtggagaagctgtcggacaaggaagccgtcggcctggtcgtttctcacctgaagaagatgctcccggatgccactgaaccgacgcagtacctggtgtcgcgatggggctccgaccccaactccctggggtcctactcgtgcgacctggtcgcgaagccggccga

SEQ ID NO: 16633 - DNA, 290 bp, Zea mays
  Clone ID: LIB83-014-Q1-E1-B2
catgttttcactataaaggaacccctggaggggggagtaacggtgtagaaggtttatgttgtcacagttggcatgcattcatataggaatagctagctgatggcaccgttatgccaacacagttataacaaatatcaattgtaaattttatgattggttatcgactaagcaaaacaattttataagaaattgttgtgcggcaatatcctttgactaaaccttagtcagatgctcgaatattgctatggtttgtaaatataatatatcatatttatagattttgttgtaat

SEQ ID NO: 16634 - DNA, 388 bp, Zea mays
  Clone ID: LIB83-014-Q1-E1-B3
cgccaacgcgtccggccttccctacagcaactgcatacatacaacacttccatctgcccgctcgtcttcgatcaattcccaagtcaaataatataacagcaatggtggttcccgtgatcgacttctccaagctggacggcgctgagagggccgaaaccctggcgcagatcgccaatggctgcgacgagtggggattcttccagctcgtgaaccacggcatcccgctggagctgctcgagcgcgtcaagaaggtgtgctccgacagctaccgcctccgggaggccgggttcaaggcgtcggagccggtgcgcacactggaggcgctcgtcgacgcggagcggcgcggtgaggtggtggcgccggtggacgacctggactgggaggacat

SEQ ID NO: 16635 - DNA, 419 bp, Zea mays
  Clone ID: LIB83-014-Q1-E1-B4
cacagccccacagtcgccccttcggacttccctttattccccttcctatataatcccatcgccactgccttcttcttccgcttccaacttccgttccgcaaatcgaaagctcggcgttgccctgcctcgagctcgaaggactttgtccctttacgtcgttgtccagctcctcgcatattgtggcctggtgcagattggagatccgcccggacttggatcgagtcctcctgtctttggacattcattggagtgctccattcattgaggcagcatgcctaagataaagacaagccgtgtcaagtatcctgaaggatgggagcttattgaaccaacaatccgtgagttggatgccaaaatgagagaagctgaaaatgatccacatgatgggaagagaaagtgtgaagctctctggcctattt

SEQ ID NO: 16636 - DNA, 412 bp, Zea mays
  Clone ID: LIB83-014-Q1-E1-B5
cccacgcgtccgcgcgagatctccgatccccgcccaaatcccacgacgccggcggcggccatgggcggcaaggacctgacggaggaccagatcgcctcgatgcgggaggccttctcgctgttcgacacggacggggacggccgcatcgcgccctcggagctgggcgtcctcatgcgctcccttggcgggaaccccacgcaggcgcagctccgggacatcgcggcgcaggagaagctcaccgcacccttcgacttcccgcgcttcctcgacctcatgcgcgcccatctcaagcccgagcccttcgaccgcccgctccgcgacgccttccgtgtcctcgacaaggacgggtccggcaccgtcgccgtcgccgacctccgccacgtcctcacctccatcggcgagaagctcgagg

SEQ ID NO: 16637 - DNA, 368 bp, Zea mays
  Clone ID: LIB83-014-Q1-E1-B6
accacgcgtccggtaaacaaccagccccatatctacctcgcaaccatatgggcaggcggtctttcatgtctaaaccagtctacccacttgtcttccggaatcctgtctcagaatcagaagcgtgcacgatgcttgaggttggtaatgccgggcgagcgacaccaagtgatgacagccaagcttctcctctgtggcgtcgcagcttggcgagcctagatctcaagttccacaatgcaccgaatgaacttgggaagatggaaacctcacccgaaccgaacacaagctcaagaagggaagggttcagatggggcaacgccatcagttatgactttggatacgatggagatgccattgacatttcagatcat

SEQ ID NO: 16638 - DNA, 397 bp, Zea mays
  Clone ID: LIB83-014-Q1-E1-B7
actcgttggcttcgtacggatgatcctccactccggcaagtatgaaagtggcgatcggctgtgtcctgaacatgagaaggcgattctggaacgtttgcttccataccatccacaatataatgagaaaattgggtgtggtattgactacatcacggtagggttacatccagaattcgaaaactcaaggtgtttattcatacttaggaaggatggcgagcagatcgatttttcgttctggaagtgcgtcaaaggtctcattcggcaaaagtaccccatgtacgcggacagtttcattctcaggcatttccgcaagacacaagactactgaagtagttgctcgtacggctgtttcagtgttatatttttctgtgtaattgattttgtcctgtcccctttc

SEQ ID NO: 16639 - DNA, 417 bp, Zea mays
  Clone ID: LIB83-014-Q1-E1-B8
accacgcgtccgcggacgcgtgggcacggttcaagcacatcgacacacacgagcacagaagagaaacgggcacacgcaactgatcaaggcaggcaaccaatattcaccgtcggcaatgggcgacctgatccctgggctgccggatgaagtggcgagggagtgcctcgtccgggtgggcttcgaccagctgccggtggtgcgccgcatctcgcgccagtggaagtcggcggctgggacccggagacgtgggcgccgacggacgcggtgctcgtctacgacttcctgtcgggcgcgtggcggcgcggcgcgcccatgcccggcccgcgcaggtccttcttcgcctgcgcggccgtgggcggcgccgtgtacgtggccggcggccacgacgccgagaagaacgcgctgcgctcggcgctg

SEQ ID NO: 16640 - DNA, 358 bp, Zea mays
  Clone ID: LIB83-014-Q1-E1-B9
aacacgcgtccggccagcttctctgcaccgtgttgctagcctggataacctgcataagaggatcttcggggatgcaatgtattccgggactgcgtcaactacattctcagatcatgaagctcttgccgataggtaaaggttgctcctgttctgtcctgtgatgaacagccgtgtgatgctctagcggtctaagtgcttctggtaatggaagttgtagcacccatgcgcctgtgtggggtctacacagtgatttgtacactattttaaacgttaataataattgttgacaaatgatctcatccctttgtacctatataagtaaagtattccattaataaagacaatagagttttcactc

SEQ ID NO: 16641 - DNA, 395 bp, Zea mays
  Clone ID: LIB83-014-Q1-E1-C1
gggtccacgacgcgtccgagcagcacactcagctatccaacacaagatatcgagacgcaggagtcatggccaccgtcagcgccgccgtggtgaccaccatcgttgcccgcgccgcgatcgccaagcccaatgcgctagggctgcctgcgctgagggccacgagcgagagggtgcggtgcatctacgccaaggacgcggccccactcagcaccaatggcgcaagcgcgtctctgctcgccgcaactggcgcggtgactgcgtcggcggggcccgcgctggcgctcgtggacgagcgcatgtccacggaaggcaccgggctgagcctcgggctcagcaacaacctgctggggtggatcctcctgtgggtcctctgcctcatctggtccctctacacc

SEQ ID NO: 16642 - DNA, 415 bp, Zea mays
  Clone ID: LIB83-014-Q1-E1-C10
aaacctttgcaagattaataaaagaagacaggaacaggcagctgataatggaatcagtcctcacttgatgaattttgtcatgtcagactcacctctgaggcagtatgccctgcctttgctgtgtgatatggctcatgcttctcgcaactctagacagcagttgagggctcatggaggactagatgcgtacttaaatctgttggaagatgatgtatgggcgtgcacggcattagattctattgctgtatgtttggctcacgataatgatcatagaagagtggagcaggcactgttgaaaaaacaggcacttcaaaagttagtgaagttcttccaagactgcacagaacactattttgtccatatattggactctttcgtgaacattagaatgaaatcttctaagcgaaacacagca

SEQ ID NO: 16643 - DNA, 394 bp, Zea mays
  Clone ID: LIB83-014-Q1-E1-C11
caaggaccccgcctcaagcgcccctcgggccgcccccacggccgcctcgacgtccgcgtcgccgtcaaggagccgtccaggtactacgaccccaacccctacccggcccccgcggcctacgccaacacgggcggcggcacccgtgacccctacggctcgtccgctgctgctgccggcggctactacggctccggaggcggataccgttccggtggtggcgcctacggtggcggcgcctactgcgccgcacatccctataccgcagcgcccccggcggagtacccttccacctactgcgccgctccgccgcctcagccagcggcagagtacggcgctcctcctgccgctgcatacggtgctcctcctgtcgccgccaacgccgcgtccgggaccg

SEQ ID NO: 16644 - DNA, 418 bp, Zea mays
  Clone ID: LIB83-014-Q1-E1-C2
gggtccacgcccgcgtccgcatacaagtccgcccacgcgtccgaggagctgaacgacaggaagaggctggccaccagtggcgccaactttgcgcgcgcctacaccgtggagttcggcagctgccagttcccctacaacttcactgggtgccaggacctcgccaaccagacgagggtccccttcatcagcgacgacctcgagattgagtgcgaggggaatgagaagttcaagtgcggctccaacgttttctggaagtggtgaagcatctagcagcagcgtctgatgggaatggacgagattatcacctgtcatgtcgagccgtaatatgtccacactgcagggaaattaaatcgtcaggtgtaattgtgcccagtctgtttcaatcatctcaacaaccgagtcatgaacctcctgcatt

SEQ ID NO: 16645 - DNA, 414 bp, Zea mays
  Clone ID: LIB83-014-Q1-E1-C3
gcgtcggggagaatcacatgaagtagccagcaaagcaaaggtgagggatgatcatgccaattgcaaactcaatgaggtacaccaaagctctgaatcagagaaagataagcaacttgtaccagataacgcagcaacaaccaatatgtcagatgtacaacgtgaaaattctcatgtacagaacaatcagaagtacgaaattatcaatgtgccttctgattctagggcacttctagttttcattaacaagagaagtggggcacagagtggtgattcactgagacagcgtctgcaaattcttcttaatcctgtgcaagttttcgagttgagcaaacatcaaggtccagatgttggtttagctttatttcggaaggtaacccatttcagagttcttgtatgtggtggagatggcactgc

SEQ ID NO: 16646 - DNA, 427 bp, Zea mays
  Clone ID: LIB83-014-Q1-E1-C4
gggtccagcccgcgtccggttgaaggaccaatgagcgtataatcagacatggatagtagcttcatgcaagttgtgcgatccgtaggtcggtcattggccttgttccagtgccctgccacattcctgtacgcctactgcccgctgcgttgcaccgagatgcccttattttctctttattattgaaccctatggtgtaaagtttcacgattgtacatgtatgtcacacttgtattggcctatgcattagacgtctccattagtttacctatatgatcatctaaaatattgttttgcagtttttatactgtagagtgaagtttgaatataaaaatgaggatggtgctggatatagccttataggcgcgccctgcagattaggtgccgcggttgagcttttgagggccaggccgcatatatattaatacag

SEQ ID NO: 16647 - DNA, 402 bp, Zea mays
  Clone ID: LIB83-014-Q1-E1-C5
accacgcgtccgcggacgcgtgggctgacgcgtgggcggacgcgtgggccgcggcggcggcggggccctctcactcgcggctttcaccagcgccaagtcccggactacgggctacaacccggccgtcatcaataagcaaaaggagttctacaataatgcgaaactaatcagcagatacaaaacgacaaggaagcagcaatgtcagtcaaacgaccatccacacattccaagccatgaggatggtggcgacaatgcccaacatgtaccgaaaccgcactaccacggcaagaagcgcaccgcgcatagtttgaacgaacagtactagaagaaacgcgcacaggatgagaaagctaacagagaccaggatgcaacaattcaggtgaagagggaacaccaggagaa

SEQ ID NO: 16648 - DNA, 410 bp, Zea mays
  Clone ID: LIB83-014-Q1-E1-C6
gagaaagcacctctgatgatttagctccgaaagtggtttgttgccaacaaaagcttttggaaaacacaggagatgattcctgtaaaactttagaggtggttcaagattcaggcgatatattgtctgcgactccacgtggtcttcagatggcacacaatctatacccctatgacaacaaattggataaaccagatttgaagaaggaagcttttgctgatcaatcttcagctcttgggaatcctttaaaagattttgttattccagagcaatcttacatctggcagggtagctttgaggtatcaggacatggaaactcccctgaaatgttcaatgggtttcaagcttacttgtctacttgtgcctcgtccaaagttcgtgaagtaggtgaacaattacctgacaaaattcag

SEQ ID NO: 16649 - DNA, 414 bp, Zea mays
  Clone ID: LIB83-014-Q1-E1-C7
aactgaccattcatcagtacaagctgcttactacatcggtgctcattggacgtctcattaatgctaatcagcaccttttggcccttcgcatctctgagtaccttaacctgaacccggaggttgtgataatgcattgggcatgtgagaagataacagcatcaacaactcttccagatacagtccttcttgatggtctgcttgataagctcaggctatgtaaagggatatcatatgctgcagtggcagctcatgcagataacagtggtcgacgaaggttggctgcaatgctcgttgatcatgagtcacagtcctctaagcagatccccttgttgctcagcatcgatgaacaagacaaagcattatcaaaggcaattgaaagtggcgataccgatcttgtgtaccttgtgctattcc

SEQ ID NO: 16650 - DNA, 414 bp, Zea mays
  Clone ID: LIB83-014-Q1-E1-C8
aacacgcgtccgcccacgcgtccgcccacgcgtccgcccacgcgtccggcggggcacagacaggaagagaagccaatggcgctgtccctctccctcgcgcgccccgcgcccctcgccgtttccgccggcgcaggagccaggaagctacccgcagccagcctcgcattcccggcgaaatccttcttcggcgcgccgctggccgccaccgcggactccgtcgcgtcgccgctcccgcgcaagccggccacctccaccacctcgctcgaggtcgtcgcgggggggaagaagggctacaagatgaagacgcacaatgcgtcggcgaagcggttccgggtgacggggacgggcaagatcgtgcggcggtgcgccgggaagcagcacttgctcgccaagaagaacaccaagcgcaagaag

SEQ ID NO: 16651 - DNA, 413 bp, Zea mays
  Clone ID: LIB83-014-Q1-E1-C9
aacacctgggaagtatgcgtacaatgaacaaacaagacaaacaattacagaatcaggtcctgatggggctgtagttcttgggactccagttgcacctcctgtaaatggggacatgtatactgatatcagtcctgagaatgcggtgctgcaaggacagaggagattaagcaaaggcgtggattacttggttgaagcatcagcagcagaggcggaggcaatcagtgctacattagctgctgtgaaggccacgcaggttaatggtgagatggagcagttgccagacaaggagcagtctccagactccacatcaactagcaaacattcaagcctcatcaaactggacactgctctttctaacaacttggcagctccacctggggttcggttgcaccatagagccgtcgtggtcgctg

SEQ ID NO: 16652 - DNA, 437 bp, Zea mays
  Clone ID: LIB83-014-Q1-E1-D1
gtcctagattcaggggtcgaggacgcgtccgagacaaatcactggaaagtatgtgtgacctcaaaagattgcataggaataccttggggaaagagaaagatggaagcagggttgaaaagagaaagaaaaaatcagctaagcaagagaaacattcaagaaatgttaaacaagcggttttgccccagacagctgacccggtttttgttgatccacgaagtcaagatcaatattttgctgcagaagatattgcatcagaccaatctgttggtagacctttcttctaccagggatatcccatgactgttgtttcaacaagccagattcaggggcatacgaatatgcaatctgagcctcagtgtgcatctcaagaatattctgcttatggcacagtgtcagccaccagcaaaatttggtggtgggaaaaaattccgaaaggg

SEQ ID NO: 16653 - DNA, 404 bp, Zea mays
  Clone ID: LIB83-014-Q1-E1-D10
gagccgctaagcatcagtactcggcatccaccccagccgatgacactctctgctcctctctccgtccctgctcatctcccgcgcgcttgcttgcttccctacccagctcggccttcagctcgtcgagtcccttcccgctgcgcccttgccggttctctgctcggccatggaaatcgcaacccccagcttcctctgtcgagtccggccggagctccctcctgctttgctcgtcggctgcgcgagctagccggcgtgctcctgctccagccttaacgcgcgcgcctgctctctctgtccggccaccctcgccccacctctctcctttgtcggcgctctgtccagtctcctccatggccgcgcctggtccctacttgagctcggctctgccctccactccagctcgt

SEQ ID NO: 16654 - DNA, 342 bp, Zea mays
  Clone ID: LIB83-014-Q1-E1-D11
aacacgcgtccgtgccgagtctgtaccagtacgacgactcaggccagaacacacggcgtatggtatggtacacagcaaggccgtgttgttgctgtaagttttgtaatttctgtttccttctcggcttcgcagcatgcagttgctgtatatgatggaagaacactctgttactgggcatgttgcgcggtttccacgcgtgtaagtaatgtaaaagtcgctatggtaggtatttccataccgtcattagtggatcattgattttttttttgtaagaaggttattgcaatgccctttttccgggcatgaataagaaaaaggaaatatgcttatatgcatggtatg

SEQ ID NO: 16655 - DNA, 192 bp, Zea mays
  Clone ID: LIB83-014-Q1-E1-D12
gacatcgttcatgtcacacatgtctagctacgagagtggcgcattgccttctgcagttcgtcaagtgcgtttgtgtgttcttgtttgcttttagttgcgactaggctgtagatccttcttgtatcacaacaatatatgtactgctactgtaccggccccggcctcttgtttaatctgaaatgctcattgtat

SEQ ID NO: 16656 - DNA, 274 bp, Zea mays
  Clone ID: LIB83-014-Q1-E1-D3
acgcttgcagtgccggtcctagattagcgggtccacgcccgcgtccgaaacgaagaactgaaaatatcaatatttccggcatctgccgttgccgtaaaaaagaatgaacattgaaaatccaagatcatcacatcactctagctcacctcactgagatgaataacacgtagctgacaaaacggcaacaatgctatagtacatacttccacaggttcaaattgatccacaaacaaatctgcaaaagggggggccccctcaaaaggtcccaatgttt

SEQ ID NO: 16657 - DNA, 421 bp, Zea mays
  Clone ID: LIB83-014-Q1-E1-D4
aacacgcgtccgcccacgcgtccgtggcagacgatgttgatctagaagctatagctaacttgacagaagggtactcgggtagtgatctcaagaatctttgtgttactgctgctcatcgtcctattagggagattcttgaaaaggagaagaaggagagagcttcagcagaaacagaaaataggccattgcctctgtcgcacactagcaatgatgtccgtgcattaagaataagtgatttcatacatgcgcatgaacaggtgtgtgcaagtgtttcctcagattccagtaacatgaacgagcttgtgcaatggaatgatctctatggagaacgcgggtcaaggaaaaagacaacgctaagctacttcatgtagctgatgttgcaagtatatcgggagaaatgccctggcacaaagcagaaatg

SEQ ID NO: 16658 - DNA, 392 bp, Zea mays
  Clone ID: LIB83-014-Q1-E1-D5
acatttttcagtatatcttcttcagatctggtttcaaagtggatgggtgaaagcgagaaattagtcgcaaatcttttccaaatggctcgtgaaaatgccccttccattatctttattgatgaaattgattctttatgcggtcaacgtggagaaggtaatgaaagtgaagcatctaggaggattaagactgaacttcttgtgcaaatgcagggtgttggtcataatgatgataaagttcttgttcttgctgccacgaatacgccatatgctctggaccaggctgtgcggcgaagatttgacaagcgtatctacattccgctacctgacacgaaagcaaggcagcatatgtttaaggtccatctcggggatacaccacacagcttaactgaaag

SEQ ID NO: 16659 - DNA, 417 bp, Zea mays
  Clone ID: LIB83-014-Q1-E1-D6
gtctctactcctcttcctcctctctctactctccaagttctcttctccgtcgaccgctctacacgtctcttgtcgacctggacaccgaggtggaagaaggaagcagtcagcagatggatccatggatcagcagccagccttctctgagccttgacctgcgcgtcggcctgccgccgctcagcctccaccaccaggcgccggtggccgtcgccttgcccaggcccaagctgctcgtcgaggagaacttcctcctgccgcctccatagaacgaaccagaggtacgcatatatacactacactccgatcctatgtgcgacgcaagcatggcaccaccccacctggactggacggacacggcgggcgtgacgacgagcacagactctaacggactgtccccttgacttgatcccaagtcgc

SEQ ID NO: 16660 - DNA, 413 bp, Zea mays
  Clone ID: LIB83-014-Q1-E1-D7
acgagccggaaatatcaagatttccggaatccgccgccgccgccgccaggctgaccaatggacctctccgtcgtgccatccctctccctctcctcgcgccgtgcccttccactcccggccaggagggcagcgcgccgtccggccttcgtctgccgctgcagttgctccccggacgcgtccccggtggccacccggcggttgttcgcctccctcctcgccaccgcagcagcggtgggggttggcgtggccggaggcggaggggaagccggcgcggtgtccacgagcaggagggcgctcagggcgtccaagattcctgagagcgaattcaccaccctgcccaatggcctcaagtactacgacatcaaggtacgaagtggggctgacgctgttaaaggatcccgtgttgcggtaca

SEQ ID NO: 16661 - DNA, 418 bp, Zea mays
  Clone ID: LIB83-014-Q1-E1-D8
atctgccaccgacgaacagcaccggttctacggggagtcgaagccgttcgggaacgactcgtacaggtcggccgagacgctgggctacctcacgtccacgcaggcgctggccgacttcgccgtcgtcatcaggggcctgaagcgggacctcggcgccgaggccgctcccgtcgtcgtcttcggcggctcctacggcggaatgctggcttcctggttcaggctcaagtacccccacgtcgccattggtgccctagcttcctccgcgccgatcctgcagttcgaccacataactccgtggagcagcttctacgacgccgtctcgcaggacttcaagtccgagagctccaactgcttcggtgtcatcagggcagcctgggacgtcctggatgagaggggggccacagacaaagggctcctg

SEQ ID NO: 16662 - DNA, 396 bp, Zea mays
  Clone ID: LIB83-014-Q1-E1-D9
aggacgcgtgggcggacgcgtgggcggacgcgtgggcggacgcgtgggggacttcaagaacttcatcagcctctgcctacagaagaacccggtgaaccgtccgtccgcgatgcggctgctgcagcacccgttcgtggcccagccgcagccgcagcccctggccgccccgccgtcatgatggctcgccgaaatccacaattcatgaccgatttgattgattgattgcttcccgtcgtggtacaactgaacgcggcgggcggattgatctctcaccttgtcgcctgacctttggggtggatggatggttggttgcatgattggttgtggatggccatgagatgcggtacctagagacgtccctcctaatcctagctaggcatgcaagtggctcaggac

SEQ ID NO: 16663 - DNA, 362 bp, Zea mays
  Clone ID: LIB83-014-Q1-E1-E1
gtccaggcacgcgtccggatgttacacatgatgatttatatgtacaagaaagctggtgactatgcccagactcgtaagctatttgcacacatgtcggagagaggaattccactatctacagtcacttttaaaagcttggtgtcatttgcgacacaatataaggaagtttcaaatatttaggatcagatgcaaagagctggtctgaaaccatatgttgtgagctaatccccgctcagcaaagcttatcggaaacccaggacggaataacaggcattggaggtttttgaagagatgcttgatgctgcagtcaggcccacacgcacatcatacaacattttgcttgatgcatttgccagatccgg

SEQ ID NO: 16664 - DNA, 406 bp, Zea mays
  Clone ID: LIB83-014-Q1-E1-E10
cgttagtcgttgcttgtggctgggacaccatatcatattcaagcttgataaggaaagtagcttcagataatgtgttcgtcatccagatccaacacccacgatctcgccttgataggtttgatttagtggtgactcctcgccatgattactatgctttaaccgctagtggacaacaagaagttccacacctgttccgcagatggattactccacaggaaccacccaggagtaatgtggtacttactgttggtgcactacaccaggctgattctgctgcgctacggcttgctgctatagcctggcatgatgaactcgcccctttgcctaagccgttgctaattgtcagcattgggggccccaccaggaattgtaaatatggtgtagatcttgccaggcagctcataac

SEQ ID NO: 16665 - DNA, 351 bp, Zea mays
  Clone ID: LIB83-014-Q1-E1-E11
agtccatccatcctccgaagctcctcggcagacaagcagcagcgagagaaagcaagcaaggcagaggcagttgtgttgctggtcggtccgtccatggggcccaagagagcaatgtcggcggcggcggcggcggagcagccgaggctgcgcggcgtgcggaagcggccgtggggccggtacgctgcggagatccgcgacccggtgcggaaggcgcgcgtgtggctgggcaccttcgacacgtcggagcatgcggcccgggcgtacgacgccgccgcgcgcaagctccgcgggcccggcgccgccaccaacgaccccgccccggagccgacggctgatgcgttggcggacgct

SEQ ID NO: 16666 - DNA, 409 bp, Zea mays
  Clone ID: LIB83-014-Q1-E1-E12
accacgcgtccgcatggatgctgaagatgaattagatgcttatgcacagtatactgagaacatagctgtgaaatctgctcgtcaatctgagagaaaagctaggagaactagagcagcaataaaagctagcacaaccctccatgcttcacaaaaggttgcattatcctcaaagaagaagcggtccaagggttcctcgtctagtatgaatcctttaggttcgttgtggaagatgaccggtaggagacttcttacagccaaggaagaggttgaattctcagaaggtattcaggatcttttgaagcttgaggcgatccaagctgagcttatagagtacaatggcggtcagccaaccttctcgcagtgggcaacagcagctggagttgatgaaaaaactttgcgcaagcgcttg

SEQ ID NO: 16667 - DNA, 413 bp, Zea mays
  Clone ID: LIB83-014-Q1-E1-E2
aagattctggagctagaagactcgatgaagaagcctggctatgtgccaaacactgttcagaagaggcttgcagaagaggtgacgcgatttgttcatggcgaggagggattggaggaggcattgaaggcaaccgaggccttgagacctggtgctcagacacaattggatgcacaaacaattgaggggatagcagatgatgtgccttcatgctctttagcttatgatcaagtgttcaagtctccacttattgatttggctgtttccacaggtttgctcactagtaagtcagcagttaagcggcttattaagcaaggtggtctgtacttgaataacgtgaggattgatagtgaggataagctggttgaggaaggtgatatagttgatgggaaggtgctcttgttgtctgctggaaa

SEQ ID NO: 16668 - DNA, 339 bp, Zea mays
  Clone ID: LIB83-014-Q1-E1-E3
ggctctccgagtctccggttccctcctctcggcggcggctcaggtccctctccatctcaggcgtagcgcttggcgtctgacctcaacaagcaagacagcaaatggcaagctgcagggttgcgcatgccaccctcaaaggcccgagtgtggtgaacgagatcttcattggactgaccctgggtctgatctcgggaggcatgttgaagatgcaccactggtactatcacaagaagactaggtccttctaagacatgcttgacaacggccaaatcagcgttgtcgtcgatgagtaaagagttcttcccacttattttcagagaactctctccataacatgac

SEQ ID NO: 16669 - DNA, 341 bp, Zea mays
  Clone ID: LIB83-014-Q1-E1-E4
acacgattgaggatggcaacaacaatggcatcgtggtgctcgtcacaagccagaatgagggcgccgtcaccggggggcgcgccttcatccaggccgtcggcgaccagattcgcgacgcgaccgtgtcggagaaccgcccattcctcgcgacggacgagaagtacaacgaggcgatcttgaacacgggaaaccggctggcggcggcgatcgacgggctggccggatactggtggcccgtccttcaaggagaacaatcggcgagtctacattcgagagcacagaagagaccgaggagaagcgcgggcagttcaagctcgtcgtcggcgggctgctcgtcatca

SEQ ID NO: 16670 - DNA, 314 bp, Zea mays
  Clone ID: LIB83-014-Q1-E1-E5
ctcagaagtctggttcgccgaagattctcgagtccccgattcaatgccgctgctgcgtctcgtcctcttcaccaccgatgattttattctatgggacgggagcgcaatctatgcacaggaacttttacactatccgcaagcagctcgatcatctcatggcggataaacgcaactgcgatgtgcgtgaggtcattcgctcgtactatcatcgcgacgtctaccgcctctagttcaccagactctgcacctactaccacttccaacttactaagattgacatggacccgtgcacgaaactgaactcgctgtaactg

SEQ ID NO: 16671 - DNA, 412 bp, Zea mays
  Clone ID: LIB83-014-Q1-E1-E6
accacgcgtccgctccccaaggccggtcgtcatcctccactccaagctgcacttcggtcttctgctcctgccaagtaccgacaccagcgctgctccttcttttctctgtcttggccagccacctctgctccatcttccagcgtcgcccacgaccggcagcgctcagcccgacctcctctcagctcgccagccatcgccatgaccgccgttcccagtgtcggcttctccagtccgccccgcctcggtcatcgtcgttgatactgcgcttaccggtggccgaagctcgcgtcgccctctccctcaccggattcagtgtccgagctctcactagagctcgtgacctcgccggctccctagagctcgcgctaacctgctcgaccacacctcaccagcttgctccaaacatgatttc

SEQ ID NO: 16672 - DNA, 413 bp, Zea mays
  Clone ID: LIB83-014-Q1-E1-E7
gacaagccgccgccgctcttccacctacctctccccggccatcatgaaggcggcgcgcgccgagatcgcggcggcgcttaacaagatgaagaaggagaccaccgcggagctggaggccaagctggacgaggggcgcagccgtgtggacgccgagctcgtagaggcgctcgccaacctcgaggcgcagaacgaggaggctgttaaggcgctcgacgcccagatcgcctcgctcagtgatgagatcgtcaagaaggtgctcccatccgcgtgatgaaaccaaaccggccctgccttatcctacgactatagttacatgaacatcataaattactgataagtttgaagaaattggccgatgactccgacaacgtactcatcaaagattattggatgggttgtgtccaccgcctgtg

SEQ ID NO: 16673 - DNA, 417 bp, Zea mays
  Clone ID: LIB83-014-Q1-E1-E8
accacgcgtccgcggacgcgtgggcgagcaccacaagtattcgtgctgctttggtctttgcgtcctggagcattaatttcccttctgatttgggtagaggatgatgcttctcgccaagctcggggcgccgagcgttccagggaagcgtcgagttgaagaagatgctataagttgcagaatagaaacataccatggttgtgtcatggacagaaggaaactgctgttggtccctgcgattagtatggccattgcctcctttcagtacacttttgtcaagggaatagcaaaagctgaatttgctgatatgcctgcacttcgcggtaaagattatggaaagacaaaaatgcggtatccagattacactgaaacggaatcaggcctccagtacaaggacttgcgggttggtgatgggccttc

SEQ ID NO: 16674 - DNA, 383 bp, Zea mays
  Clone ID: LIB83-014-Q1-E1-F10
aggacgcgtgggcagcactcgccagtcgccaccccgatgctactggtgcgcgccccgccgtctcccgcgccgctctcggcggcggccaatttcccggctgatctggagcgcccccttcgccttcgcggtctgtcctcttcccgtgccggcgttactacggccactgccacggcgaagccggcggcttcctccctgggcgggcaaaagcgcaagcaggtgacgagcgtggcgaacccgctggtgaagcactgcgtcaagctccggctctccgccgcgtaccgacgctcctgccgccgcctcctcctcgtcggcctcgcgcctatcctggacgtgtgtagttttgagctcgaagccatcgattacttgcttctcctggaccgcgt

SEQ ID NO: 16675 - DNA, 407 bp, Zea mays
  Clone ID: LIB83-014-Q1-E1-F11
gatgccccattcaagcagtggtacctcactcactatggagttgacattggtaggaagaagaaaacccctgctgcaaagaaggataatgctgagggacaagaggttgaggcagcagctgaggaaacgaaaaagagcaaccatgtcacgaggaagcttgagaagcgcaaggagggacgtacccttgacccacacattgaggagcaatttggcagtggacggttgctggcatgcatttcttcccgccctgcacagtgtggccgagctgatgggtacatccttgagggtaaagagcttgagttctacattaagaatctacagaggaagaacggcaacagcgctgtaacttagagcattctcatggattgtcttgcaccgaaatgtgtgtcctgatgagtacaccttttttg

SEQ ID NO: 16676 - DNA, 375 bp, Zea mays
  Clone ID: LIB83-014-Q1-E1-F12
gcggccgccctttttttttttttttgatccaaacagtctcataataaattgagaataggctaagctggagagtgacgcaaaccattcaatcaatcatatctcaattctcaaaacttggagctgggggctaccccgctacactcgaactcgatagaggtacgctgacatgggagtgtccgaagttgttaattttgctgtgagaaacgacaattgagacggcctactgactgaacgttgctgcgaggaacatgtcctcctcgctcccaatccacccgcactggccgcagcgctcgccggcacggcagcactcggggggcacgccgccgggcatccttcccgtcgtcaattgagcaccggcgacggcgtggacagcct

SEQ ID NO: 16677 - DNA, 425 bp, Zea mays
  Clone ID: LIB83-014-Q1-E1-F4
ccggtcctagatttgcgggtccaggcccgcgtccgagtcgctgaacccggacgcgccgctcttcatcccggcggcgctgctgcaggtggaggacttctcgccgcagtggtgggacctcatcaccaccactgcctggttccgcgagcactggtcccgcgagcgcgcccacctggaccagatggccgatcagatcgacgcggccggcctcctccccgacgacgaggacctcttctacgacgaccagctcgagcaagggcccgtcgccgccgcccttaggacagattcggtgcccaaggcgcggaacatgacctccccgaagggcggcggcgacgcctcgcgggggttccgggacaaagccaggaagcccgagaagccgactaagtactccggcagccccaagagcagcgctccccgcgtgatcaaca

SEQ ID NO: 16678 - DNA, 397 bp, Zea mays
  Clone ID: LIB83-014-Q1-E1-F5
aacacgcgtccggagaaacttgctttcattcttgagcatgtccggctatgcctaaatcgtcaagattatgttcgagcacaagttttatcaaagacaatcactactagagtagttgacgcagatccatcacaggaaaacgagaatccagacgacggtgacaacattgttcatgatgctcctgcagatattccatccctccgataattgacacgaatctaccatgatctgaggattcgatattacttgcagaaaaatgattacctgcaaatctgtcgttgttacaagtctacttatgatatcccagcaatagaggaagatctaaccaagtggataccgattcttaggaacatctgttggtacttggtgctatcacctcatgatcctattcaatcgagcc

SEQ ID NO: 16679 - DNA, 412 bp, Zea mays
  Clone ID: LIB83-014-Q1-E1-F7
cggacgcgtgggcggacgcgtgggcgtcgtcaccagcagggtgtcccggccctctctagtttctaccccggcccccaacattggcctgatgctgctgccatgtagcccagcgctcccccctcggcttcaccggcggcggcggcaacgacggtgaaaactacatcgggtgctagctccgacggtggtgcgtgccctgttgacgatagggcacgcggggcgcgggcagcttgtaagcgttcgatcggccatgtagggcaactatacatctttggcaggtctccatcatcctccgtgggagagaagatggtaatggagtgcgtgtgtatgtatgtgtatgcccagggcgcgcgcgcgcggctctgggcgagtcacagtagagatgcaatatcatgtttccagtatccttcttaca

SEQ ID NO: 16680 - DNA, 415 bp, Zea mays
  Clone ID: LIB83-014-Q1-E1-F8
gataaactgcactgcaggaatggagtacttggcaattcaacactgggcagccttcttcacaagaaacgaatcttagtggttgacgacaatattgtaaatctcaaggttgctgcaggcgctctgaagaaatatggcgcagaagtaacttgtgctgatagcgggaagaaagcaatcacgcaactgaaacctcctcacagttttgatgcttgtttcatggacatacagatgcctgaaatggatggatttgaagccacaaaaaggattatagtgatggaaagagatctaaatgagcaaatagaacgtggagaagccccaccggaatgcgcatggctccggcagtggcgaactccaatattagccatgacagcagatgttatccatgcgacgcacgaacagtgcttaaaatctgaaatgg

SEQ ID NO: 16681 - DNA, 402 bp, Zea mays
  Clone ID: LIB83-014-Q1-E1-F9
aactgacgtcttcttcccgctccgtgctctcctcctgcaaccggccggtcgctcgtgctctttgcaggacggcgtacccgggtgcaaggaggaaggagaagggaatagtatgcagtatcttgagcgaggagaaagaagtggtacaaaggacgatccggaggcgagctgccttttctttgttgctggcttcgccggtgctatcagtggcgttctcggcctatgggaagagtacaaccatgaacccttacgatgaaaggcgtctgcttcagcagaataagaagattcaggaagccaaccgtgcccctgaggatttcccaaacttcatcagagaaggcttccaggtcaaagtagtgacaccggacaactatattacacgggcctctggactaatgtatgaggaca

SEQ ID NO: 16682 - DNA, 402 bp, Zea mays
  Clone ID: LIB83-014-Q1-E1-G10
caccacgcgtccggccgccgataaaacggccagccgggcagcggagacgcggagtggggcgcgacggcgcgtaacctgtggggtttcaggttttgtccctgcgtggcagcgacccagccccatcgagcatccaggcatggaaccgggagccaaatcggaagcaaagcaaggtgaggcgggatctggcgcgggggcaagcggcagcggcaaggtgtatcatgacaggcagaggctgcaattctgtctcctccatgctctcaacaaccttatgcacgaaaaggaatgtttcacccgtgttgagttggacgggattgctggaaatcttgttctcaatgatccagacaagggccaatggactcctctaccattcatttttacacctcaccacaatgttataactgg

SEQ ID NO: 16683 - DNA, 409 bp, Zea mays
  Clone ID: LIB83-014-Q1-E1-G11
cagacgcgtgggagcttttcttgtgcgcagccgcagccgctgcttttcgttcgtcttcatcctacgcgagggcgaaacccacaaaccctctccctcccgtactccggcctacacatccaggggcgatgacgctgggtagctccggcgccggatcgagcgtcgtcgttccccgaaacttcaggctattagaggagctcgagcgtggagagaagggcattggtgatggaacagtgagctatggaatggatgatgccgatgacatctacatgcggtcatggactggtaccatcattggccctcacaatactgtacatgagggtcgcatctaccagctgaagttgttttgtgacaagggctatccggagaagccaccatctgtcagattccactcaagaatcaacatgacatg

SEQ ID NO: 16684 - DNA, 409 bp, Zea mays
  Clone ID: LIB83-014-Q1-E1-G12
ctcgacgtcgaggcggggacatcgggcgccgccgccacgggcggcgcgcgccagctctacccggggatgcaggagagccccgagctgcgctgggcgctcatccgcaagatctacgtcattctctccctccagctgctcctcaccgccgtcgtcgccgcagtcgtcgtcaaggtccgcgccatcccgcacttcttcaccaccaccagcgccggcctcggcctctacatcttcctcatcatcctcccctttatcgtgctgtgcccgctgtacttctaccacgagaagcacccagtcaacctgatcctgctcggcctcttcagcgttgccatcagctttgctgtgggcatgacatgtgccttcaccagtggcaaggtcattctggagtctgcaattctgacaacagtggtcg

SEQ ID NO: 16685 - DNA, 409 bp, Zea mays
  Clone ID: LIB83-014-Q1-E1-G2
accacgcgtccgagcaagtgctactggaaaggcccctgttaagaaacagtctgctggggagctccgtcttcataaagatattagtgagctcaacctgccgaagaccacatcaatttcttttcccaatggcaaggatgatctgatgaattttgagatcaccatccgacctgatgaaggatattacatgggaggcgctttcgttttcacctttcaagtgtccccatcttatcctcatgatcctccgaaggtcaaatgcaagaccaaggtgtaccatccaaatattgatttggaaggcaatgtctgtctgaacattctgcgtgaagattggaagcctgttctcaacatcaacaccgttatttatggcctgaatcttctttttacgcaaccaaacgacgaggatcctttgaac

SEQ ID NO: 16686 - DNA, 417 bp, Zea mays
  Clone ID: LIB83-014-Q1-E1-G3
acacgagtccgagcttgatcttctccttcaccaactgggccgagtgggacgggccgtacacgctcaagttcagggtccccaagccatggcagaataagccgctgagcttcttcaacgatggcctgtcggacgagctcaacagggagggcgcctgcgacctggccatctacccggacgagaacatcgccatcaccagctgcgccatggacggctacctcgaggacgggggggatcggtgcaagctggacattgtgagcggatgcacggaccccagctccgacatgttcgacccgctaaccaccgtctacgacgggtcctgccccctcgagtctgattccgacgaatgatggtggagcttcatctcaatccgacggagggaggcaacagcaacaaacgtgatccacacatacatcatat

SEQ ID NO: 16687 - DNA, 60 bp, Zea mays
  Clone ID: LIB83-014-Q1-E1-G4
gggtccacgcccgcgtccgaccacacgtccgcggacgcgtgggctagttctagatggcga

SEQ ID NO: 16688 - DNA, 416 bp, Zea mays
  Clone ID: LIB83-014-Q1-E1-G6
ggccagcttcggcgtcgacacccgcccggccgccgcggcctccggcggcggcgtgggcgtggcggggacgagggagggcgcgctctcgtttctctcccgcgggctgcgggaggaccttcgtctcatccgcgcgcgggccggggagctcgagaccttcctcagcgcgccggtgccggaacccgagctgttcgcgcgcctccgtcgcgcctactcctcctcggcgtcctcttcgcggacgcggctcgacctgtccgccatcgggaaggcgttcgaggccgacgcgtggaggggcgccaggactgccaggtggaggtgggaggcggagacggaggcggaggagtgggagccagtcaggatggtcaaggcgcacctcagcgagctcgagcggaggaggctggcccagtcgcccagcgaca

SEQ ID NO: 16689 - DNA, 413 bp, Zea mays
  Clone ID: LIB83-014-Q1-E1-G7
attgctggtgctctgtttgggcaactgcgtggccttgcgctggtggtctttgctgccactgcatgtgcttcttcgtgctatttcctgtcgaagatgattgggaagccactggtgttcacactgtggccagataagctcagcttcttccagagacaggttgctaaaagaagagagaagttgttgaattacatgcttttcctcagggtgaccccaacattgccaaataccttcatcaacttagcttcacccatagtagatgtcccctaccatatattcttactgggaactctcattggtcttatcccagctgcttatgtgactgtcagggctggaattgctcttggagagttaacttcgctgagtgacctttacgacacccagtcgataacactgctattcctgatcggtgttgt

SEQ ID NO: 16690 - DNA, 419 bp, Zea mays
  Clone ID: LIB83-014-Q1-E1-G8
acaacttctcggtcgtcgacggccccgccagctccgccgcgggtaaccccgatgagatcgccaagctcttccccaacctgttcggccagccctcggcgtcgctggtgccttcggccgagcccgcggcgaccaggccgctaaaggtcggtgtcgtgctctctggtggacaggcgcccggcgggcacaatgtcatctgcggcatctttgattaccttcaggagcgtgcaaaaggtagcaccttgcttggattcaagggaggccctgctgggatcatgaagtgcaaatatgtggaactcacttcagactttgtgtatccctacagaaaccagggcggattcgatatgatctgcagtggaagggacaagattgaaacaccggagcagttcaagcaagctgaagacacagccaacaagcttgat

SEQ ID NO: 16691 - DNA, 398 bp, Zea mays
  Clone ID: LIB83-014-Q1-E1-G9
aaatttgacactcttatttttggtatgcagctgctaggatgcctttcaaatcccaatgttgtgtcctttaaagagttatcgaaaatatgttgaaattgctacggacagtacgaagtttttcatcagttgtctgaaacatgttgaaattgctactaagagtagtgagtgttgcatcatagcctctcgaatcaatgatgtctttaaagaatggtatgccatgtgtaaaaagtgctactacagttgaggtcctagtgcaccagtattgatggtaacctcgtcaaattgattgagatgcggacatttgtgttaacatggtgccatgggttgcccactgaaagttgttgcagttactagtaagttcaccttgtgttaaattctgaaaattaacagtcacagta

SEQ ID NO: 16692 - DNA, 429 bp, Zea mays
  Clone ID: LIB83-014-Q1-E1-H1
ggtccacgcacgcgtccgaatttaacgagagattttggagtaccatcctcaaatgctacaagaatacctacaaggagcagaccacaatcagatgaccttcatgtatccaagtggggtggatcgcttcaggcgccaatttgctcatttggaagaaggtactgcaaagggtgaaaaacacagtccacagctgcgacagaatgtttctttgccaagggaaagagtaattggcaataaacatggagatggcaatacaggtgataagctagcgcatgcctcagtgacggatggcatcagccaaccgagcttgagtgagagaagctttctgaagagtgaaagcatcagtgcttccaactgtatacgtgaaaaaccgaagcatgtcaaagatggagaatctgttttaaagaacgtgggataaacagtccatgaatt

SEQ ID NO: 16693 - DNA, 350 bp, Zea mays
  Clone ID: LIB83-014-Q1-E1-H10
aggacgcgtgggcgaacttctcctgtcgtctgcctaccagtagctagctctaatacatagcagccctcgctcgcaaggtactgcactacgatggtcgccacctcctcctcctcctcctccacggtagttgcacttgcggcgcttctcttcttgctccttgtaacgtgtggctcgtgcgcgagaccggcgagctttaacgcctccgactttaccgccgaccccaactgggaggctgcccgggccacctggtacggtgcgcccaccggcgccggccctgatgactactgtggtgcctgtggattcaagaacgtgaacctgccgccgttctcggtcatgacattgtgcgggaa

SEQ ID NO: 16694 - DNA, 390 bp, Zea mays
  Clone ID: LIB83-014-Q1-E1-H12
atattagctagggtttcaacacatctgacggcggaagctatggcgtcgccaccgtcaatgtcttggcactcccgctctgttcatcaatcgcatcgacaggagcccatcccctcctccctcaaacgacgccgggtgacaagcaggaaaagtagtgctccatgattctctataatatccgaaataaattaggattaaagcaagaataggaagttattcaatactcaaaagtaaagggtttccggtcttccagttaaatgaccaaatgacctgtagaatgacagcaagcaagcaagataaacggcagacagatttcaccaactcatagcagtgcacgccagggaagaaagcaaaatttgacacatctcattgtctaataagtttgaagcctca

SEQ ID NO: 16695 - DNA, 428 bp, Zea mays
  Clone ID: LIB83-014-Q1-E1-H2
ggtccacgcacgcgtccgatggattccagcagtccagccagaggccagctgctcggggaagacggagtgcgcgtgcacagcatggttctccctggtctcgtctccagcacgtcgatcaacttctctggcgcaggagagatgtacaccttacggcatgacgttgcgaatgttcagtgcctgatgccaggactgatcctggcgatacggaaggtggtgcggttcaagaacttgatttatgggctagagaagttcttgtagtgaacaacagacaaccaatgcaaaacatcgacaggcaacaggcaacgcagatatcatctgacgtcgcaacaaccaaaacgacagagatttggaaaataaaggctgcacagaagacgtctggggttttgtgtgcaccaggctgcgcagagaacgtctgtcattttgtgtgc

SEQ ID NO: 16696 - DNA, 205 bp, Zea mays
  Clone ID: LIB83-014-Q1-E1-H5
aaaagcgcggtgttaatatctcccctcgcttccctcttctggtctccgccgcgctccgtgcctccgatccacaattccgccatcggatctcgcagtcagcgcaacggacgtgtgaacgaagggggacgcagaggaagatagggctcacgttcgggaagcacttcagcgggcgcgtcgtcccatatggagatgcaggatcctcatg

SEQ ID NO: 16697 - DNA, 382 bp, Zea mays
  Clone ID: LIB83-014-Q1-E1-H7
cccacgcgtccgcccacgcgtccggaagacatatcacagggacctcttcaggcttcaaggcagatccgcagcagatggaggcgaagagcatgctgccggaggtgaccatcgtcccggcggcacggccgttggctggcgacggcacagtcgacgcggcaaaggcggcggcaggcaaggagcccgtaagcccgggcactccgtcctcggtggccgccggccgcagcagctgtgaggagaggcgcgcggtggacggcgtcgccctgcctgcgtggaagctcgacgccctctgccaggagtcctgcccgtcaccggccatgagggcgcgcttcccctactacttctgaagctttcctgttgcagtcctgcctgagttcttgagcgg

SEQ ID NO: 16698 - DNA, 413 bp, Zea mays
  Clone ID: LIB83-014-Q1-E1-H9
caaatcattcgcgagcagggcgccctattttatattatcatcatttgagcagctgcaatctggattcatctaggtcagccgccatcaaaggataccacctcacgcgtcgcacaacggtcacgcccgcagtgggcatggacggtagatcggacgagacggttccaacaccattccacacgatagacgacaagctcaagccggactgagtcaggtaccagcagattccagtgggagggccgtcatgtgctgtgtaccctgtgcggctcaccgccggtgtacgtgacctgcgatttcgcctgggacaagtggtgggatagccccgcgctattcgcagacccggagactttctacaaccatcgcaaagtgtctctcatccacaaccgcttgactaagcatcggcacccccgggtttg

SEQ ID NO: 16699 - DNA, 295 bp, Zea mays
  Clone ID: LIB83-015-Q1-E1-A10
cccacgcgtccgtgttggcactgtccccttcagtcagacctgcggatcaacggcggtggctccaaatctccaatactactacatatgaacggacaccacttttgtgcgtttctgttgacgggaacctgtgtaattctttcacctttttttccctgtggttgacagacacagacactgtaatatgtttattaaaaacactcatccatatagctgactgtgcacctcgtctctcaattcatcctcatgctctactgcagaacgttcaaaaatgagatcgtgagggcctacgcacaag

SEQ ID NO: 16700 - DNA, 394 bp, Zea mays
  Clone ID: LIB83-015-Q1-E1-A11
ccatccgtttctccgcgatgggcgccggccgtgtctgtcgcggcggcccctcctccgtctcccccgccgcagggcggccgttctcgacgctcgccgcgtcgtcctccgcctccccttcctcggctccttcagagacggcgtccacgtcggtcaccaagacggtgaacggctcccaccacttcaaaatcgcgggctagtctctctccaagggaatcggggtggggaagttcatcgcttccgagtccttcaacgtggggggattcgactgggcgatctacttctaccccgacgggaagagcgccgaggacggcgctgcctacgtctcgctcttcatagccctcgccagcgagggtaccgatgtgcgcgcgctgttcgagctcacgctcgtcgacca

SEQ ID NO: 16701 - DNA, 332 bp, Zea mays
  Clone ID: LIB83-015-Q1-E1-A12
tggtacgcctgccggtaccgtgccgaagccgcgggtcgaccatcgcgtccgccctcgcttgcgccgtgacgggcgcagggcatgtcagtgcctgtggttcctcctccttctcctacgacacatggcgcccgttcgacatgcactctgcttatttctcggagtcacctttctcgggaccgtcatacacggtgtccaggtcggacaccatgatcgtgaatggctcccactaggtgacactcgcgggctagtctcactcaaaaggaagccatctgtggaagttcaacaattcttagtcctgcaagattggaggatgctactgagggatgtagttc

SEQ ID NO: 16702 - DNA, 425 bp, Zea mays
  Clone ID: LIB83-015-Q1-E1-A2
cccacgcgtccggcggtagcgaaaacgcgagcgctgcggaacaacgatggcgacgatgtctcttgccgcggcgtcacccctcgcctccattccccgcggcatcgccgctcaggctccttgcgcggcattcctgtccatccgcttaagtggcgcgacggcgacgctgttcgctggactggcggtggcctcgcagccagcggagcgtcgcgccgcggcgatggtcacgatggcgaagagggagcaggagctggaggagatccgggccatgacgaccgaacagatggtagaggaggtggtagacctcaagggggagcttttcctgctccgccttaagcgctcggcgcgccaggagttcaagaacagcgagttcagccgcatgcgcaagaggattgctcgtatgctaaccgtgaaaagagagcgggaaa

SEQ ID NO: 16703 - DNA, 424 bp, Zea mays
  Clone ID: LIB83-015-Q1-E1-A3
cggacgcgtggtggacgcggtggagagcgagtggggccagggcgccgacctggccgcgctggagcgcaggctccgcgaggacgcgccgcggcacgccatcaaggccgtggccatcgtgcacaacgagacggccacgggcgtcaccaacgacctggccgccgtgcgcgcgctgctggacaagcacgcgcacccggcgctgctgctggtggacggcgtgtcgtccatctgcgcgctggacttccgcatggacgagtggggcgtggacgtggcgctcacgggctcgcagaaggcgctgtcgatgccgacggggatgggcatcgtgtgcgccagccccatggcgctggaggccaacaagacggccaggtccgtgcgcgtcttcttcggctgaaggactacctcaggttctacgacatgggcacgtact

SEQ ID NO: 16704 - DNA, 423 bp, Zea mays
  Clone ID: LIB83-015-Q1-E1-A4
ggaaggccgcgcaaatacggacctgatggcaccatgaggcaacaacaacaacagcaacaggccgcgtcatcgcagcagcagcagcagcagctcgtcgctacacaaccgaggatatgttctctatcatcgggtcccgacatgctcggcagctccggtatggaggaccccgcgcagaagaagcggcgcggccggccgccgggcaccggcaagaagcaccagccctcgacctcacaaggcaacgcgttcgccggttcggctggaacgaacttcactccgcacatcatcacggcgtctccttcagaggacgtggcggcgaagatcgttgcgttcgccagccagtcgtcaaaggcgatgtgcgtcctctcggcgatgggttccgtctccagggccgtcgtccgccacccggccgacggctctcccatg

SEQ ID NO: 16705 - DNA, 431 bp, Zea mays
  Clone ID: LIB83-015-Q1-E1-A5
cggacgcgtgggcggacgcgtgggcgtgcccgtgcggtggttcgaccagatccatctcacacccttatcctctttacgcctcaccactacagagaaaaagagaaacctgcgagcgacggggactatggccgccacccgcaccgccctggccctgctagggcacgagggcatggaatctgggcccaggccggcggcgccgcgccgcagcaggctacgcgtcgtcgccgtcgcgctgcggaccaggcccaccagcctcgcggccccgggtctcccgcccgcggcgccggagcccgtgctgccgtcgccgcccgtggccgcgggcgccgcggcggtgctgctcgaggcgggcgtgccgcccgccgacctccggcgcgcggcggggatgtgcccggagctgctgtccgtgtccgcggaggccgtcgaggccgcgc

SEQ ID NO: 16706 - DNA, 434 bp, Zea mays
  Clone ID: LIB83-015-Q1-E1-A6
ggcatcatccgtctcgtctcgtctcgcctctcctctccttttcccccctccctgcacagcgccgctcaccgtcaccggaccacagcagcgatcgatggctgaggtacacaacgagcggcccgtggggatggtgggcggcgtccgggacgcgccggtgggccgcgagaacgacctcgaggccatcgagctcgcgcgcttcgcggtcgccgagcacaacagcaagaccaacgcgatgctggaattcgagaggctggtgaaggtgaggcaccaggtcgtggccgggaccctgcaccacttcaccgtcgaggtgaaggacgccggcggcggcgaaaagaagctgtacgaggccaaggtgtgggagaaggcgtgggagaacttcaagcagctgcagagcttcgagctcgtcggagacgccgcggtcgcctgaggcgcac

SEQ ID NO: 16707 - DNA, 433 bp, Zea mays
  Clone ID: LIB83-015-Q1-E1-A7
gtacccacgcgtccgatgatgaaaggattccaccgtgttgctgagagtcttgatgatctcattcttgacataccatctgcaaagtctgaatttcagttgttggtatcaaaagccatttctgagggatggttagattcttcctatgtgaactcaggtgtcaacggaagcgttgaagacgatgaacatgagaagctggctaggtacaagagggaggctgtatccataatacacgagtactttttctctgatgatacaacagaggtcatccgtagtgtcaaagagcttggttatccggaatacaatccgatcttcgtcaagaagctcataacaattgctatggaccgcaagaacatggagaaagaaatggcatcggttcttctcccttcattaagcatggagctgttctcgtctgaagacatcgccaagggatttg

SEQ ID NO: 16708 - DNA, 418 bp, Zea mays
  Clone ID: LIB83-015-Q1-E1-A8
gtgaggcaggaactggtccatgcgaatcaaatctttgctcagaatccatcgtggccagtcattgcggtcactggaaaagctatcgaggaaacagctgctgtcatcttggggatcctccatgacaggaagcagaagtgctccatgccacgcatatcaaaacgatactagcactgtgttctatcccttctctactacaccttgtaacgtgtgcatgttttgaataagctttgtatcaaggaccatagccttcatgtaatttttttttgttggaccaccttctaggtggtgccgtttgtatcataaacataacttgaagtttagcgcagcagaaacacatgtatattgcgtttaaaaaaaaaaaaagcatcaaatcaactcacatcagtgaacagagaccagttcacaaaaaaaagggcgg

SEQ ID NO: 16709 - DNA, 395 bp, Zea mays
  Clone ID: LIB83-015-Q1-E1-A9
catactttggttcactgcgtacaagatgaaaaagccgaacaagtacaactatccaattggaaagaggcgcatgcagccagtgggaataatagttttcgcatcagtgatgggcacacttggcttccaagtgctgatcgaatcagggcgccagctcataactcaggagcacgcggatttcaagttcaagcaagagctgtggatggtcattagcatgtcctctgttgcggtcgtgaagttcttcctcatgctctactgcataacgttcaagaatgagatcgtgagggcctacgcccaggaccatttcttcgacgtaatcacaaactcggtcggcctggtctcggcgctgctcgctgtccggttcaaatggtggatggaccctgttggcgccatactga

SEQ ID NO: 16710 - DNA, 137 bp, Zea mays
  Clone ID: LIB83-015-Q1-E1-B1
tccgggtcgaacacgcgtccgcagacgcgtggggtaggatcgatcttgttagcagagcagaactcgttactaaaaaaatctatattatattacagacactatagctttttgataacttgccgtgcaaatgtggtaac

SEQ ID NO: 16711 - DNA, 385 bp, Zea mays
  Clone ID: LIB83-015-Q1-E1-B10
cggacgcgtgggtgaccacaaaagtgtttggagtgccccagccagggtggtacatggtttattacatcattaatactattcaagagttagtaaccgctctgacccaagagcatccggtggtgctgatgttctgggcggactggaaccagccaagcaaggccacgtactgggatctggccagcgctaaaaaggatgaggccgtattctgccagctggactttgataagtttaaagatgtcgtagagaagttcagagtgaaggctctgccgacgttcctcctgatcaatgagggcgaggagcagcgcagggtcgtcggtgccaaggtcgaggagctcaacatggcattatcacatatcggataatctaagcagctatagcgctcaca

SEQ ID NO: 16712 - DNA, 366 bp, Zea mays
  Clone ID: LIB83-015-Q1-E1-B11
gcaggagaaagccaaaccattgccctcccctcttgaaggcttggagcttggttctacattctcttctcttcccctccgtctctctctctctctctatttggtttgcttgcttgcctctactagactctagtcgtcgggtccggccatggccaccatcgtggagaacatccataaggcgaggttcctgccgaccaggccgctcaaggacgagctgcccatcttccagtgcggcggcatcagcaaggaggagagccacctcatgggcctgaggaagcggctgtccagcttctccggcaagatccagcccatctcctccgcgtcgggtgccgagtgggcgttctgccgctccaagtcggcgccctccct

SEQ ID NO: 16713 - DNA, 330 bp, Zea mays
  Clone ID: LIB83-015-Q1-E1-B12
tagcgcgtccggcctctccgacaagatctggaacaacgggcccatcagcttccaactgcagtggttccagtaggtcacctccgccgtgtgccggcaggactgcaagaactacctggccaactcgctgttcgtgttcggctagttcgggggcaacgactacaacgccatggtgttctacagctataaggcgggccaggccagcgagtagatgccacacatcgtgatcgccatcgcggccggcgtggacaacctgctggtcatgagcgccacggacgttgtggttcccggggtgctcacagcgggcggatccccacctaggtcactcgtcta

SEQ ID NO: 16714 - DNA, 418 bp, Zea mays
  Clone ID: LIB83-015-Q1-E1-B2
cacacgcgtccgcggacgcgtgggcggacgcgtgggcgaggagccgaccgacgggcgaagcgggagggaggcgatggcggcggcttgggggcagaaggccctgggggctctgccgcagctggtgaagtcgctgcggagtgatcccgtctccggcagcgcacgacacaggcgccttccgtctctcaggaggaccttctcgttgtacgatcagatcaacctcatcgacagcgtcccggaagacgagctccgattccagtcgtatgatgacactggattcaaaattaacaatgtaaaatatgaaggcagtgtattgattgtagagaacaagataatgacatgggcacccaaaacgttctcagagataactcctgaaagtttatcaatcttcagagttgtgcaccctatcccagagatcttt

SEQ ID NO: 16715 - DNA, 438 bp, Zea mays
  Clone ID: LIB83-015-Q1-E1-B3
ggtacgcctgccggtactgttccgatgctcgtgggtgctcgagacgcgtgggccgacgcgtgggcggacgcgtgggccgccgactactccttcgccagcaggccgccggccacactcgtctttctcacgagccacaggcacaggcaggctctcgagctcagtccacccagcgcaggggatggcgtcgtcgttcgccgtggcaacggtcccgtcgctggcggccccggcggccaagaagcggtccggcggcgtcacgtacgtggagggcatgagcgcctacagcggcctcaaggggctcaacacggtgaacatgctcggagtgcgcacgaccgccgactactccttcgccatagtcgtggcgtcgctcagccccgcgggcaggaagcggcgcggcggcgcgttcggcgcccacatgaacgccgccgccgagatcgtcag

SEQ ID NO: 16716 - DNA, 424 bp, Zea mays
  Clone ID: LIB83-015-Q1-E1-B4
cggacgcgtgggcggacgcgtgggcggacgcgtgggttttttttttttaacagaaagcacaagtcatctcattatcgacggcaatggtaggttgatgttggactagcactcgatccttagatggatcagaatgcatacgggcgacaaggaatggaagaacatacgtccccacaaaaagtttcatggggcaacaccacaatcgtctgcatttaagcagtaatgccgaatatggagtttcgacttcatttcattttcatcccatggcatttctgggtccagctgcgggctgttgcctcgtacttaggccgatccgtcttggacatgtgagcaatctcagggacaagaggatcgtctgggttgggatcagtaagcagggagcagatagaaagcaaaaccttagagattgtcaaagcagggctccact

SEQ ID NO: 16717 - DNA, 363 bp, Zea mays
  Clone ID: LIB83-015-Q1-E1-B5
cggctgtcatcttccctaccggaagcagcggcagggggcaagatggtgcggcttggggcaagatggtgcagtggctcacctaccggaagcggcacagctacgccaccaaatcgaaccagacccgcgtcgtcaagacacctgttgattaggtgggaaacttgtgttccagtacaccaagaagcgcgcgagcggaccgaagtgcccagtcaccgggaagaagatccacggagtatgtgccgcccatctttctattttatcctctcgttattgtgttacgtcgttgcatcatgctccatgcagagatttcaactttaatgctgcttgatcagcctacgctaagagtttctgatggaacatgtattt

SEQ ID NO: 16718 - DNA, 436 bp, Zea mays
  Clone ID: LIB83-015-Q1-E1-B6
cttcaacctttgcatgcagagacctagtggaatagagcgaggggaatggagcaaggagacgaggcgtcgtcggtgaccaaggagagcccggagcatcagcttacccgggaccgggagcagcagcacgacgccggcgtggcgtggctgaacctcacgcttcgcgcgggcgagtcgccctcgccggacgcggctgcgagctgctccgccgagtccgggtccgggtccgggtccgggtccgggcccgagcccaccgccaatccgtccgccgccccgcacaaggtgttctcctgcaacttctgcctgcgcaagttcttcagctcgcaagcgctgggcgggcaccagaacgcgcacaagcgggatcgcagcgccgccaagcgctcctaccacgcgcaccgcatgatcgtgggcctgccgctgcacgcgcacgccgcgctca

SEQ ID NO: 16719 - DNA, 425 bp, Zea mays
  Clone ID: LIB83-015-Q1-E1-B7
cggacgcgtgggcggacgcgtgggcgaatcccgtcttcttcctttcttggccttctccacctcatcgccgagacgagatctctcccacacgaggagggcagcagggaagggagagatgggcgggcgggtggatcacgagtactcctacctgttcaagatggtcctcatcggagacagcggcgtcggcaagtccaatatcgtctctcgcttcacgcgcaaccacttctccctcgactccaagtccaccatcggcgtcgagttcgccaccaagtccctgcagatggacggcaaagcagtaaaggctcagatctgggacacagctgggcaggaaaggtaccgtgcaattacaagtgcttactaccgtggagccgtgggagcactgcttgtgtacgacatcacaaagaggcacagcttcgacaatgttc

SEQ ID NO: 16720 - DNA, 173 bp, Zea mays
  Clone ID: LIB83-015-Q1-E1-B9
atatgaagcgcacgaaactgaaaacgagtgtgtgaaacgtgatgcgtggtaaactgttaatgcgatgtattctgctgaagaaaattcagttccgtatggctgggtagatgaacatgtttagcgcaaagtgacggtgtaactgcaaccggggtaatggcttgcaagttttgttc

SEQ ID NO: 16721 - DNA, 374 bp, Zea mays
  Clone ID: LIB83-015-Q1-E1-C1
ggcacgcgtgggcgagaagcatgcccacagtattgttagcaaaatgatgatgcatgaagagcttcaggctagctggcaccagccaacagagtgcaccgtgtttcacagcctggatcaaaccaggcttcaggagctactcttccaggttgcagaaaaaatatcggtcctggtggagacaaacgagagggcatacgagttaagaactggtggtactcttgaggggctaccgcccaggcgcaggggcgaagctcaggattcatccaagtggcacgagagctttgtcccatcacagggggcggcacggtggtgggaaccggtttgggtactccgggagaggtgcagcatctggtcaaagtggtgggctccagaggggc

SEQ ID NO: 16722 - DNA, 348 bp, Zea mays
  Clone ID: LIB83-015-Q1-E1-C10
caccagcccagcagcagaagcgcccctcggccctcgctcccacaacaagctcaagccagccttctctctctctctgctccaatggcgcgcttctagctcgcagccgtggccatggccatgctcttcgccgcggcggcggctcatgcttcacagccatctcgtactcggctcgaaaggtgtctctcacgcctggtatttctcctccaatgcccgcgcgggtttacccgagcctgtcggcacgtttcatacttgccgtgttgccagcactcacccagattgcttgtaggccgcacctctaagaaccatgcctagctgatgtcgcctccgtcagtctgtcagcattcaagc

SEQ ID NO: 16723 - DNA, 368 bp, Zea mays
  Clone ID: LIB83-015-Q1-E1-C11
ggtacgcctgccggtaccgtgccgaagtctccgggtcgataacgcgtccgcccctgcagggagacaaacagcgattgcgtgataggattctagattcagagaaatctgcaaagattgacgcccagcttaatgatcacgtcagtaggatgctcacgtcgcttgactaggatatgagaaatgacacatccaactcgttctatcaaaagacattacgatataagctactcctaaaagatcattgtctcaaccaacacaacctatgacagcgacagtgttacctcaactatattcacctgaagtcgttgccatgataacggcaatctctcaaccaacggcatcaatggtccggaaagtactgcgccaaccta

SEQ ID NO: 16724 - DNA, 441 bp, Zea mays
  Clone ID: LIB83-015-Q1-E1-C2
ccaagaccaggaaggaaacaccgccgccgccgcgccttccattccagtactcgcggaggaaaggaacaccagccagcgccatggtcacgtcgaccaccgccgccgtcgtgctgtccccgccgtccgtggccgggcttcgcctggcgccgtctccccgggcgcgcgtggcgttccgcgcggcgcgggcgcagcggtccgtggcggcgcgcgcggagctgagcccgtcgctggtgatcagcctgagcacgggcgtgtcgctcttcctgggccgcttcgtcatcttcaacttccagcgggagaacgtggcgaagcaggtgcccgagcagaaccgcaagacgcacttcgacgccggcgactagcgcgccaaggggttctcgggcctgctcaagtccaacgaccccgtgggcttcaaactcgtcgaggtcctcgcctgggggtcgc

SEQ ID NO: 16725 - DNA, 433 bp, Zea mays
  Clone ID: LIB83-015-Q1-E1-C3
cacggacttcagcagttgcagtgccggctgcctccctctcgcgtgcgctcgccctgtgcctctcgcgtgcggaagctaggcaaaccgccggcgccctagctaggtgcccaggccatcgtcggtcccttcgccaagccatcgtcggggtctcggggattagcacccgcacccacaagatggccacaccgaacggtccttctgcttctccgatggtgtaccctgtctacctttctggggtatttccccagcaaggcggggatgatcaggctcaaggtccaaggatatatgccatacaacagaaccagttagcagcggcgatgggaatgggttgctatgctccaaccacactcattcgcctcacttacaatatcccaacagaaagcattggtgctcctgctggtgaagagaatgtacaggatgctaggcagcaaaa

SEQ ID NO: 16726 - DNA, 432 bp, Zea mays
  Clone ID: LIB83-015-Q1-E1-C7
cgctggtgaacaacgggtacgaccccgaggtcatcgacatcaggtcgctgaagccgttcgacctgcacacgatcgggaactcgatcaagaagacccaccgcgtgctgatcgtggaggagtgcatgcggacgggcggcatcggcgccagcctgcggtcggccatcatcgacaacttctgggactacctggacgcccccatcatgtgcctgtcgtcgcaggacgtgccgaccccgtacgccgcgacgctggaggacgccaccgtggtgcagcccgcgcagatcgtggccgccgtcgagcagatctgccaatgatcagtgatatcatggctttgttgagtacctgatctgtggagtcagattaccgtggttttgtttctctgtcgcatcgcgactgtcaccgtgccttagacaagacatgtttttgtattttgca

SEQ ID NO: 16727 - DNA, 433 bp, Zea mays
  Clone ID: LIB83-015-Q1-E1-C8
gacagcgtcaccgtgggggacattgctactgtcattccacaatgcttgtggcatcggctccgacaagatccgcatggatccattgactcgggtttacttggcagtgataagttttatcaattctttagctaaattgttcttgatgtaactgttcctaagtcacaatctagctaaagactacacagagctgcttgacgcatctgcacagcatggatacgcatgaatccattgactcgagtttacttgatcagtgcaaaatgttatgaagtcgttagctatattgtacttgaagtaaatgtaccttactcacagtttttgtcgggaatgctcttgttctgttactttcatgatgttctgccgtctaatcacatctgaagcttgaattggtatcaagaaagccggggccctctggttgtagtaaattgagaacccc

SEQ ID NO: 16728 - DNA, 406 bp, Zea mays
  Clone ID: LIB83-015-Q1-E1-C9
gcccagaaagcgctcgaccgccgttcccagcgtcggcttctccagtctgccctggctcaacgcttggacaccgggtccactgtgctcgtccgtgccccggactccatggcgttctcgcctccatgctagctccagccgagtcttttttcccatcgagctcgccctcaactctacagcgccgtctagcccgtcgtttttctcgtccagtgctcgcgcggttttacccgaaccgcgctgccgtctcctagttgccgtgctgccatcactcacccagcttccttgttggccgcgcctctatactctactcctaccggatgtcgcctccgtcagcctgtcatcattcacgcgaatatcaaatcaaattgagatatggtgagctgattcactagttttactattagtttta

SEQ ID NO: 16729 - DNA, 169 bp, Zea mays
  Clone ID: LIB83-015-Q1-E1-D1
catcctgcctgatgcaaacatttcctcttccgatcgtgccgacgtttagcgtggtacgaggctgctggttctcggcacggtcgagatgtctgaagtgtccgttagaaaccacgcggacgtggaggacgcggacgccgggtagctgatggacctgccggcgagcttcggc

SEQ ID NO: 16730 - DNA, 122 bp, Zea mays
  Clone ID: LIB83-015-Q1-E1-D10
acgcctgccggtaccgttccgaagaccccgggtcgataacgcgtccggcatgtttgtatatcactatctgggtaaatagtgtccgccttcgaaaataatacagcaaatgtttgtgtacccct

SEQ ID NO: 16731 - DNA, 407 bp, Zea mays
  Clone ID: LIB83-015-Q1-E1-D11
aaccaacaaggcagcaacacaagcaagaaccacacctcctcccttcgcctgtgatcatgtcgtcttgctgcggcggcaagtgcgggtgcggctccagctgctcctgcggcagcggatgcaacggctgcggtatgtaccctgacgtggagaccgccgccaccagcagcgtcaagaccacggtcctcgccgcgccgaccaccaaggccagcgccggcggcttcgaggcggccaccgatggcggcggctgcgactgcaacacctgcaagtgcggcaccagctgcagctgctcctgctgcagctgcaactgagctggcccggcccggcgatggcgcacgagagtcgagaggaggatgacgacgaccaggcgtataaatataatagcggcgtccagtacataagattctgtc

SEQ ID NO: 16732 - DNA, 397 bp, Zea mays
  Clone ID: LIB83-015-Q1-E1-D12
cggacgcgtgggcgccgccgccgcgccttccattccagtactcgcggaggaaaggaacaccagccagcgccatggtcacgtcgacgaccgccgccgccgtgctgtccccgccgtccgtggccgggcttcgcctggcgccgtctccccgggcgcgcgtggcgttccgcgcggcgcgggcgcggcggtccgtggcggcgcgcgcggagctgagcccgtcgctggtgatcagcctgagcacgggcgtgtcgctcttcctgggccgcttcgtcttcttcaacttccagcgggagaacgtggcgaagcaggtgcccgagcagaacggcaagacgcacttcgacgccggcgacgagcgcgccaaggagttctcgggcctgctcaagttcaacgaccccgtggg

SEQ ID NO: 16733 - DNA, 438 bp, Zea mays
  Clone ID: LIB83-015-Q1-E1-D2
gaaagcaacgactccgcgtccgcctgacctgacgtccgcctgatgaccgattatcttccttctccgtccgagtaaaggaaagcaacgactccgcgtcccgcttccctttccccgcacggcggagttcacaatccccaccggccggcgtagcggatattgcgagttacgacggggaaggagaggaagatccgtcgatccgcgcagattcgtttcgatcgtggtttggtgacttggtaagaggggaggggagaagcggcgatgtcgggcgtgttcggcagggtgttcgggaagtccaaggagcagagccaggcgaccgcgctggcctcgctcgacaagctcaacgagacacttgaaatgttggaaaagaaggaaaacttgctagtgaaaaaggccaatcttgaggtcgagaaggctaagaattttaccaaagccaagaat

SEQ ID NO: 16734 - DNA, 424 bp, Zea mays
  Clone ID: LIB83-015-Q1-E1-D3
cacagcagacgccgtcacaactcccatccatccgcttcttcgactccacatcgggagccgcaagcagaaccaatgacgacgacgacgaagcagctccgccgcgtgcgcaccctcggcgcgcggcgcgtcgggcgccgtggtgtggctggcctccgacgaggcctcgggcgagctggtggcggtcaagtcggcgcgcgccgcgggggccgcggcgcagctgcagcgcgagggccgcgtcctccggggcctctcgtcgccgcacatcgtgcgctgcctcggctcccgcgccgcggcgggcggcgagtaccagctcctgctggagttcgcgccgggcgggtcgctcgccgacgaggccggcaagagcggccggggccgcctcgcggagcgcgccatcggggcctacgccggggacatggcgcgcggg

SEQ ID NO: 16735 - DNA, 436 bp, Zea mays
  Clone ID: LIB83-015-Q1-E1-D4
tccctctccatctccggcgtggcgcttggcgtctgacctcaacacgcaagaaagcaaatggcaggcggcagggttgcgcatgccaccctcaagggcccgagtgtggtgaaggagatcttcattggactgaccctgggtctgatcgcgggaggcatgtggaagatgcaccactggaacgagcagaggaagactaggtccttctatgacatgcttgacaagggccagatcagcgttgtcgtcgaggagtaaagagttcttcccagttattttcaaagaactctctcgagagcatgacaaagtgattgcttgctgtggagatttgtcctggaaataagcacaaccatttgggaacaccagattttgtcgaattttcctttccttttgatgaatatttgagcacgtccatgtcaataccaaacatctggccttttctctc

SEQ ID NO: 16736 - DNA, 384 bp, Zea mays
  Clone ID: LIB83-015-Q1-E1-D5
cccacgcgtccgcgacacgcagtcctgcatggaccccaacgtcatggaggccaaggtcgtggtcagctcctgcggcgacgacaggcccttcggcgccaccggcgtcaagaggctccaagacatcagcatgatgagcgccgtgccggggatgaaggcgctcgacatgaacaccgccgacgacgagatcgtgcgcctcacgcgcgaagtcgttcccggcatgatcatcaccggaatggaggtcgccgagattgacagcacccccaggatgggcccgacgtttggcgccatgatgatctccggctagaaggcggcgctactggcgctcaaggccctgcgcaggcccaacgccgtggaccggaatatgtcaccgccgttgcacgagga

SEQ ID NO: 16737 - DNA, 431 bp, Zea mays
  Clone ID: LIB83-015-Q1-E1-D6
cccacgcgtccgggcgccgtcctcctcccgattcgacgatccggcggcggtgaggcgcccccccgcagcatgaacggaagccgccgtagatgttgcttctcccgctcgtcgacgcccccgtcctccccctcatcaggatctggctgcggcacaatcccgtaatgagggaccgtctcttctacggcatcctcgccggcgcattcgactacggcgcctacctcatatcggaactgtatgatgtggagagcagatgatgggcatccctcgaaggatgaggggataagttttcacgtagcaaaatttgattccatcgggattccagattgttggatgagagctgacatggcaattcagactaactagtgtgctatgtacccatatgttttctttggtcatgctattatgtttggcaacacgatggaatggttgag

SEQ ID NO: 16738 - DNA, 430 bp, Zea mays
  Clone ID: LIB83-015-Q1-E1-D7
ctcacctccttcgccgttgtctaccagatcatcccatggcgtcggagaagaagcagtcgaacccgatgcgggagatgaaggtccagaagctcgtgctcaacatctccgtcggcgagagcggtgatcgcctcacccgcgccgccaaggtactggagcagctgagtggccagtcaccggtattctccaaggcaaggtacactgtgaggtcgtttgggatccggcgcaatgagaagatcgcatgctatgtgacggtgcggggtgagaaggcaatgcagctgctggagagtggcttgaaggtgaatgagtacgagctgctgaggaggaacttcagtgacactggctgctttggatttggtatccaagagcacattgatcttggcatcaagtatgatccatctactggtatctacggcatggacttctacgtcgt

SEQ ID NO: 16739 - DNA, 436 bp, Zea mays
  Clone ID: LIB83-015-Q1-E1-D8
cccacgcgtccggcaggccgccgacctgatcgcgtctcaatctcagcaagacgacagccgggctgcggtcggcagcgccttcaacgacttctccttccacgcgcccaccatgcccgcgcagaccacgtccttcccttccttcaaggagcagcagcaacagcaagtcgaagcggcgactaagagcgccgtcccgtcgagcaacaaggccagcggcggaagcggcggcagcaccaagcttgaggacgggtacaactggcgcaagtacgggcagaagcaggtgaaggggagcgagaacccgcgcagctactacaagtgcacgtaccacagctgctccatgaagaagaacgtggagcggtccctggccgacgggcgcgtcacgcagatcgtgtacaatggcgcgcacaaccaccccaagccgctgtccacgcgccgcaac

SEQ ID NO: 16740 - DNA, 338 bp, Zea mays
  Clone ID: LIB83-015-Q1-E1-D9
aggagaaggagatgagagagaaggaattgagcatgggtcttcgggatttggtcgtggacactgacgacggtggcaatgccaatcgctccaaggagaacggtagcagcggagggcccagcgtactgcgcaggaatgtcgtcaatggcccaaccacgcctgctaggtaatggctttctagagcttgcagtgtgcttggtggaagaagcagtgccgcagtgcatcaatctgtgtgacaaaagcaaataaagatctgttgtccttttctcgcttatacctgtttaagctgtctattgtattctgttgagaaatcaatcacatctatactttgtttctgctag

SEQ ID NO: 16741 - DNA, 425 bp, Zea mays
  Clone ID: LIB83-015-Q1-E1-E1
cacacgcgtccgcggacgcgtgggtcctcctcctcgaggaccgccgtgcaggagcggagctccccgccgcttctctctccgccttccgagaggcccgacccctgataccacgctgagggcggtgggattaggagattagcgatggcgacgtggcggccggcggcgctgctggtattggctctggcggaggttctatcggcggcgtggcgggcggatgcgctatcggttacggtgaccgacaccgagtgcatccacgagtttctgccctatgagggcgacaccgtgtccgggaacttcgtcgtcgtccaccacgacatcttctggagctccgaccatgcaggaatccgactcacggtaaggtcaccaggtggcaacactgtgtacacattggagggaaaatctggtgagaaatttgagtttaaagc

SEQ ID NO: 16742 - DNA, 338 bp, Zea mays
  Clone ID: LIB83-015-Q1-E1-E10
atttgaccttggtgattacagctgtaatttgttgctggatgatgtatgcaatcgtctaccttgctcagatgaagccattgatcgaccccattctgagcggagagtgagcgctgcatctgtattgaacagaacgaaagcgagacctgctgtaccattgttcagtccgtgaactttatattcattttggccccacctgatgaaataaataaataaactgccatgatttttttggtgccactcttcacccgtgattagtgtatgcaattgcatgatatacgcagtaataacatataaatatctatgtatcgatcatgtgcttgaaaaaaaatataagaatg

SEQ ID NO: 16743 - DNA, 418 bp, Zea mays
  unsure (1)..(418): unsure at all n locations; Clone ID: LIB83-015-Q1-E1-E11
cccacgcgtccgcaggggtgtagatacaagccgtgataaacaacagccttgccaaattggcttgcttatataagagcaataggtctcaacaagttgctgcacacaggaaaagaaagggcatatcgaggaggtttttagggtggtggtggtgttgtgaggagctgctgccgctgctctccagtctccaccgatggcgatcaagaacatgacggtggcggcgacgacgcggtcgctggacgcggacatgacggtggacgagttcaaggagtggctgcggcggttcgacacggaccaggacgggcgcatcagccgcgacgagctgcggcgcgccctgcgtgccatccgctcccggttcacggggtggangagcaagcaaggcatcagttacgccgacgctgaccgggacggctacatcgac

SEQ ID NO: 16744 - DNA, 383 bp, Zea mays
  Clone ID: LIB83-015-Q1-E1-E12
acacaaaaggtggggtatagataagattatagatggatggtgacacaacacagcagggcacatggctagcctgctagcgtgcggcacccacacaacacaacacaacacactgctcgccagaagcgccccagggggccaggggaggacacgacgccgccatcaggcatcatcatcatctcagactcggagcatgccatggcacgcaactgactgactgactgactcgaaacacacacagcgacgccgctatactttattaagctttataattagctagcttcctccggccggcctgcagggtggagcacctagctcacttgccgcagttgcaggggtcgcactggcagttgccgccgcacttgcaaccgccgttctcaactccg

SEQ ID NO: 16745 - DNA, 415 bp, Zea mays
  Clone ID: LIB83-015-Q1-E1-E2
aacgctccccaacgaagtgcgagcgacccacgtccacacgacacgaaccaccaccaccaaccagcagccgcaccacgcacccagcgcaaagcgatggcgtcgctcaccatgatggcgtccttcgccgccgtggcggtggccgcgccctcgcgccgcggcaccttcgccgtggtcaggtccgccaaggtcgaccgctgccaggagcccgccacgctagcagcaaccgaggccaggcccgccgccgacggacgccgcgccgtcatgctcgcggctgctgcggcggccgtggcagccatcggcggcgccggcgccgccatggcgggccccaagaacgggacgcccgacgcgaagaagaagtacgcggccatctgcgtcaccatgcccaccgccaatgtctgccacaactgagcacgcc

SEQ ID NO: 16746 - DNA, 417 bp, Zea mays
  Clone ID: LIB83-015-Q1-E1-E3
cactctgaagacgatgctttgggtggttcgaagcataagaagaagaagaccaaacttgtagatgttcaagttgaacagaaggataaattattggggttaaaattgtggaatttaagagctctagttttgaaatccttacaccaatgtttcctctatgataatgaccagaagatccttgattcctctaatttccaggttcttttgaaacctattgtctcccagttcgttgtggaaccaccaaaatctgttgaatcagttcttgacgctccatcaattgaagaagtagatgaaactataattctgtgcttgggccaaatggcagtaactgcacggacagatgttctttggaagcctcttaaccatgaggtgctgatgcagactaggagtgatgaagttcgccccaaaatgctgggcctg

SEQ ID NO: 16747 - DNA, 436 bp, Zea mays
  Clone ID: LIB83-015-Q1-E1-E4
cggacgcgtgggcaacgacggagggggaggcggcgacgacgccgtgctgttcaagggttccgccatgacccgccgaggtggcgccgctgcgctctcctacatggcatgctccgtgctgctagtgatgtttaacaaagcagctctttcttcatacaaattcccttgcgcaaatgtcatcacgctccttcagatggttattgttgcgcaccacacctctttccttggcttatttactctacatgcttcgatggaatcggtccgtggagttaacgttcctatgtatacaactctacggcgcacaacagtcgtgtttacaatgacaatggagtatttcctggcaaagcagaggcacaccccacctataataggcagtgtggctttgattgtattcggagcatttgttgctggagctcgagacttgtcatttgatgctcgt

SEQ ID NO: 16748 - DNA, 431 bp, Zea mays
  Clone ID: LIB83-015-Q1-E1-E5
gggctcatttacgatatcttgaggacgatgaaggactgcaacatccagatattttatggccggttcagatcagacaagaaagggtcagccagcaaaggttcatcaggttgccgtgaggtggatcttttcgtgaagcaagtagacgggaagaaggtgactgatcctgcgaaacaggacgcgctgcggtcacgcctgaggtccgagacgctccatccgctcagggtcatggtcgtcggccgtggacccgacacggagctcctcgtcgccaacccggtcgaggcctccgggaatggacggccgcgcgtgttctacgacgccactcttgctctgaaggcgcttgggatctgcatcttctctgctgagatcgggacgcaagcggcgtccgagcgccactgggacgtgtacaggttcctcctggatgacagcaagga

SEQ ID NO: 16749 - DNA, 437 bp, Zea mays
  Clone ID: LIB83-015-Q1-E1-E6
catcatcgccgagcgtgcgtgctctagctctagcaatagcagcgaggagacgatcgaggatggatcagaacaacagcaacaggcagcagcagcaggcgccgccgccaccacccgcgggctacccgacggcaggcgcggagcagcagggaggcagcggcaggaagcagggacgccgggggaagacgacctcgcgcggggagaagggcttcatcgaaggatgcatcgcggcgctctgctgctgctggatctgcgagatgtgttgcgactaggcagcccccctcccctccctccgcccgccaggcttgacaggaacggagagatctgctccacccatagctgcagttgtggctgcacgtacttgttgagctgttgtgttgtgtccatctcggtactttttgatttgttattagctgtggtgatgatgcatgggctgccct

SEQ ID NO: 16750 - DNA, 428 bp, Zea mays
  Clone ID: LIB83-015-Q1-E1-E7
agcgcttatagcttgtcagccatggccaccgccgccgcgtctagcctcctcaagtcctccttcgcgggctcccggctcccggccgccacgcggaccacaccggcgtccctcgtggtggccaccggcccgcgcggcgccggcgcggggcccatctgcgcgtccatgtccatgtcctcttccaacccgccctacgacctgacgtccttccggttcagccccatcaatgagtccatcgtgtcccgcgagatgacgcgtcgctacatgacggacatgatcacctacgccgacaccgacgtcgtcatcgtgggcgccggctccgcggggctgtcctgcgcgtacgagctctccaaggaccccgccgtgagcatcgccatcgtggagcagtcggtgtcgccgggcggcggtgcgtggctgggcgggcagctgtt

SEQ ID NO: 16751 - DNA, 430 bp, Zea mays
  Clone ID: LIB83-015-Q1-E1-E8
ggctatctaaagcagaggaagttcaacgacgcactcatgggcattctgcgagtccgcgatttgagcagccctccagatgtttacagaagtccacacacattgagtcacaaagttacagatgatgatttgtttgttgtgcttggtagtgatggcttatttgatttcttcagcaatgatgaagttgttcggttggtttatcaatttatgcatgataatccaatgggggatcctgcagaatatcttattgagcaacttatactcaaagcagccaacgaagcagccgaagaattgatgaggatacctgttgggagtaggagaaagtaccacgatgatgtgactgtcattgttatcatccttggaaatgcacagaggacgatgactgcatcaacttccttgtgaaagaatggagaggtatagagacgggggctat

SEQ ID NO: 16752 - DNA, 358 bp, Zea mays
  Clone ID: LIB83-015-Q1-E1-E9
ctcccggtgggcgatgctgggcgcgctgggctgcgtgtttccggagatcctggctaagaacggcgtcaagttcggcgaggcggtgtggttcaaggccggcgcgcagatcttctcggagggcgggctggactacctggggaaccccaacctggtgcacgcacagagcatcctggccatctgggcgtgccatgtggtgctcatgggcttcgtcgagggctaccgcgtcggcggcggcccgctcggggaagggctcgacaaggtgtaccccggcggcgccttcgacccgctgggcctcgccgacgacccggacaccgccgccgagctcaaggtgaaggagctcaagaacggccgccttgcc

SEQ ID NO: 16753 - DNA, 482 bp, Zea mays
  unsure (1)..(482): unsure at all n locations; Clone ID: LIB83-015-Q1-E1-F1
acgcctgccgngtacgttccgaagcctccgggtcgacaacgcgtccgcacacgcgtccggcggaactcagacctctaagaagggtcatctttaatgctttgtacaaccgcaaactggcaagcatgaaagcaggctactcgcacaaaaccgcttcacctttcgcggacatgctggcttttcgcaaggtcaaggcaaggcttggaggtcgtcttcgcttactgatttcaggaggggctccgttgagtaatgagatcgaggagttcatgagagtgaccacctgtgcatacttcatccaaggctatggtttaacagaaacactgggacctagcactgtctgctacatcgacgacatggccctggtcggaagcgctggtgtgcctgccacctacaccgaaattcggctggaagaagtgcccgagatgggttataatccactcggcgttccttcgcgtggtgaaatctgcatccggggaaaatccctc

SEQ ID NO: 16754 - DNA, 405 bp, Zea mays
  Clone ID: LIB83-015-Q1-E1-F10
cccacgcgtccggatcctcgctccacggccatggtgaggatgaagcaggtaaagatttcggtaaagaaggacgtggattcgtacacaatccgcggcaccaacaaggtcgtccatgtgggcgactgcgtgctgatgcgggcgtcggactcggacaagcagccgtatgtggcgggtggagaagatggaggccgacggacgcggcagcgtgcgggtgcaggtgcgctggtactaccgccccgaggaatccaagggcggtcgccggcagttccacggcgccaaggagcttttcctttccgatcatttcgacctacagagcgcccacaccatcgaggggaaatgtgttgtccactctttcaagaactacaccaagcttgataatgtcgggcctgaggactacttctcccg

SEQ ID NO: 16755 - DNA, 327 bp, Zea mays
  Clone ID: LIB83-015-Q1-E1-F11
ggcagatgttggggtactcgattccctagcgcccagacgtccttcctcgccctgaagctcgcctagctcggccgtcctccaagtttcgcccagcgcagtcgttccgcctatgctcggcgccgggtttctgcgcgcccggctctgctccttcgcggcggcagcttggtccaggatgtcagtattcctgtacgcggcctggagttggtggacgacaggagagcatgaactgatgaagtgatgggccggcgaacaaggaagcccaattgccaatgggccggtgccgagttggttcgttgaagggtgggccggcgcttaatagctggttgt

SEQ ID NO: 16756 - DNA, 377 bp, Zea mays
  Clone ID: LIB83-015-Q1-E1-F12
cggacgcgtgggcggacgcgtgggttttgcagcaaccaggaagctgactgaagataaatatcagcaaatgttaccacaccagatataataaaacttatccagtaacatatactgatctccttattatttcacatgaaatggtggcaaaataaaacgtatccaggatgaggatggagtcaattcaaaactgctgctgttccctgcatgcataactcatctcccagcacccatccggtacaactactggcggtatagacacatcatgacaaagctttcatgagaagatctttgaccttccgactaaagttgtctatttgaatctgctcacattgagatagttctatttgcagacaacaaaagattgatatggataaagg

SEQ ID NO: 16757 - DNA, 230 bp, Zea mays
  Clone ID: LIB83-015-Q1-E1-F3
cactggtttccacaaaataagattgtcaatagctactacgtacttatgctattctgcatgtgatgtacgagtgtgcatcttcaagaatctttaagttgaatggtcccataataatattgataacaatgtaaattgtatgtcctgtacgtactttggtatcgcgacatctcagtgtgcatcttcaaggatcataagttgaatgttatcattaaggtcagtttggttcagat

SEQ ID NO: 16758 - DNA, 474 bp, Zea mays
  Clone ID: LIB83-015-Q1-E1-F4
acgctgcagtacggtccgaagctccgggtcgacaacgcgtccgcttggagctctcctttgctgtgttctggccagctcaagaaccactgcatctgccccctataatcagtaccttgggctgccgtattcagtgaagatttcttccttgccctcaaattctagtcaaagttcactgtttgagtgtgcagtccttgtgtactgctggtataaccctctctgcagcctaggtttgccctgtcccagaacccttctccccatggactagatgcgctcactgacacactcctttcccatgcttacatattctgtaatttggggctagttattttggagctcctcactgcccttaaattccagccaagactctttgcatatgcgaagtgttcctgatgttcttaagtctacacagctccctccctagccaccaaaatttggtctgtacagaggctgggcacaccatcaactgttgttgtg

SEQ ID NO: 16759 - DNA, 432 bp, Zea mays
  Clone ID: LIB83-015-Q1-E1-F5
gagagagagagagagagagcgcgagcgagcgaagagggcgtgagagaggagggaggccaagccgtacgcgtcgtctcctgctgtttctccccatccctttcctgcctcggcttgcaccttcaaccttacttaaagctctgacctcaaactgaaagggacctgcgaagagttttttttgcggcagtacaatggaggtatttggcaaatctgtgattgctgagcccagcaatgtgattttcttgtccgcgatccttaacacagaacggtcaaaccctagtcacaagtgtgacaagaggtgccagagcgagcgcattttggggaacatgtaccgttgcaaactgactgaaaccactcatatctgtgacaaaaactgtaaccagaggattctatatgacaaccataactcgctctgccgagtgagtgggcagcttt

SEQ ID NO: 16760 - DNA, 213 bp, Zea mays
  Clone ID: LIB83-015-Q1-E1-F6
aacacgcatagacagagacctctaccgagacaagagggagtgagagaggagggaagctaagccgtacgcatcttatcctgctgattctccccatcactttgttggctctgcgtgcatcattcatgcttacttacaactctgacctcaatgtcaaagggatgtgctaataattttttttgtacgagtagaatgttcgtatttggcaaatcagtt

SEQ ID NO: 16761 - DNA, 418 bp, Zea mays
  Clone ID: LIB83-015-Q1-E1-F7
ttcccggggtcaccgacgcttgcgattgtcgctgcacgcgctgcgcagccatccggcatccggcaagacggcgagggagtatgtaccgatccatgtatcatagtcgtgttccagcaccgattccatccaaatctaaacttcagcagtttcactgattcacttagtacgtagtcagctaatcaaccttgatccatcctaagttttctgtcatgttgtgtagttcctctatttccagtttacacgacaaccatgacgattaatttcgaatggacggagttcatagctaagttgcaatcacctgctgtatagtgttccaagtcgtggtaatctatcttcttcattatgataggagattagccagtcagtgtgactcagatcacacatgtaacaggtgcaggtatcattggattccatatgc

SEQ ID NO: 16762 - DNA, 434 bp, Zea mays
  Clone ID: LIB83-015-Q1-E1-F8
acaggctacagctcccgtctctccgccgcttgcttggaaaacgaagaaaccctcctccaccaacccaatccagctacatccgtctgggtgaactccagggccaggagcagttcgccgccttcgttcgcatcacctacgcggttcgatccaactggcaggaaggaacgtgatggccaagacgagctcgttcaagctggagcacccccttgagaagaggcagtctgaggctaatcggatcagagagaagtaccctgacagaattccagtgattgttgagaaggctgagaggagtgacattcctgacatcgacaagaaaaagtacctcgtccctgctgatcttacggttggacaattcgtgtatgttgttaggaagagaatcaagctcagtgctgagaaagctatcttcatctttgtgaagaacacccttccaccaa

SEQ ID NO: 16763 - DNA, 369 bp, Zea mays
  Clone ID: LIB83-015-Q1-E1-F9
cccacgcgtccggcccccagctctctccttctccctgctcgctcgctcgccatggacgctccgagcagctggaagagtcctgcgcgcgccaagtgaccggagaagctgcgagatcagagtagttgcttgccgctcccgtgccaccaaattagattggacgtagctagcagctagctgagccgtagtgcgtagcggcagctaggctgctagctcgatcgttatagctgcgtactagtggtgtcgcagcagaagcagtagccagcttcagtagccgatccggtggtaaaagcaactttttttggacatggcggcggagggagccccggtgctggtgaggcatgctggcggcgtggaggagctgcggcagct

SEQ ID NO: 16764 - DNA, 400 bp, Zea mays
  Clone ID: LIB83-015-Q1-E1-G10
atgctccacatcccgagatgcatcaagtttgtcagcacagttaacaggcccaaccttttttataaggtgtctgagaaatcgccagttggaaaggttgtcattgatgagatcacaaagtttataagtgaatcatacccaaataatgagtctggaattatatactgcttttcaaggaaggaatgtgaacaggttgcaaaagaactgcgcgaaaggggtatttcagcagattattatcatgcagacatggatatcgttaatcgtgagaaaattcatatgcggatcgacacacaagggatgtgattgggactggccgtcgccgtaaatcttcgcctcgcctctacatcttggacaccttgcgtcatccttcacaccatatcactacaactcatgtgcttgctgc

SEQ ID NO: 16765 - DNA, 382 bp, Zea mays
  Clone ID: LIB83-015-Q1-E1-G11
aggctccacatcgcgaaaagcaccatcttcgtcaccacagttaacaggccgaagcgtttttataatgtgtcagagaaatcgccagttggtaatgttgtcattgaccgggatcacaaagtttataagtgaatcatacacacataatgagtctggaattatatactgcttttcaaagaaggaatgtgtataggttgcacaagaactgcgctaaaggggtatttcagcacattaggagcatgcagacatggagatcctgaatcctgacaaaattcataggcggatcgacacacatcggatgtgattgggactggccgtctccgtaaatcttcgcctcacctctatatcatggacaccttgcgtcatcgttcacaccatatcacta

SEQ ID NO: 16766 - DNA, 321 bp, Zea mays
  Clone ID: LIB83-015-Q1-E1-G12
acgcctcatcctctcagtcgccggcattgcggtagccgcgctcgtcgggcgccaccgccatgtggcgtccgggcacggtgccacgctcacagtgttcccgctcatgccataattcgtgctcgtcggtgcgggcgaggcattcatgtatatgggccaactcgccgtcttcctgcgcgagtgcgccaaggggatgaataccatgagcacgggccggttcctcaacaactgcacgctcaggttcttcttcagcaccctgctcgtcacaatcttgcacaacgtctcggcccacaccggacgtgactgttagctcgcctacaagct

SEQ ID NO: 16767 - DNA, 433 bp, Zea mays
  Clone ID: LIB83-015-Q1-E1-G2
cggacgcgtggggaagattaccccaacagacctccaactgttcggtttgtttcgaggatgtttcagccaaacatctatgcggatggaagcatctgtttggacatcctacaaaaccagtggggcccgatatacgatgttgcggcaatattgacctctattcagtccctgctgtgtgacccaaacccaaattctcctgctaactctgaagcagccagaatgttcaccgagaacaagcgtgagtacaaccgcacagttcgtgacgttgtggagcatagctggacagccgactaaaactttatccgcttcgccaggcggtgtaaataaagcatctgtctttcctacttggccggtctgttttaccgttagaaatcctcagctatcgttgtgttcttgtggttcagtcccttgatgtactgatgcctgcgggttttcc

SEQ ID NO: 16768 - DNA, 424 bp, Zea mays
  Clone ID: LIB83-015-Q1-E1-G3
aggcagcccaagcgagcgcgctgcaatggcggactcgtcggcgccgacgagagtgatgatggcggtgaacgattcgtcgctcaaggggtacccgcacccctccatcagctgtcgcaccgccttcgactggacgctctctaagctcgtccgctccaaccctgggggcttccacttcctcttcgtccacgttcaggtccccgacgaggacggatttgatgacatggatagcatctatgcttcgccggaggactttcaccaaatgaagcagatagacaagataagagggcttcatttgctcgagtactttgtaaaccaatgccatcagttagggataaaatgcgacgcatggatcagacatggagatccaaaggaggttatctgcagcgaagtgaagagagtccagcctgaccttctagttgtggga

SEQ ID NO: 16769 - DNA, 139 bp, Zea mays
  Clone ID: LIB83-015-Q1-E1-G5
cccacgcgtccgcccacgcgtccgattccatgcatctcgatctgtatgtactccgcccgtcgatggatgatgcatccatctctacttgttttcctcacatgtacaacaattaatgcaacaaattaagtacgtacttgag

SEQ ID NO: 16770 - DNA, 433 bp, Zea mays
  unsure (1)..(433): unsure at all n locations; Clone ID: LIB83-015-Q1-E1-G6
cacaaacctgctatcagcattggaaagagtgtgaatcattttccattgtgggtgattgaaatatcagacaagcccaggcatagggaatctgaaccagcattcaagttcattggaaatgttcatggtgatgagcctgttggaagagaggttcttatgcatcttgcaaattggctgtgtgataactatctgaaagattcactggcaactctcattgttgagaacatgcaccttcatatacttccgacgatgaaccctgatgggtttgctcttagatggcgtggtaatgcaaacaatattgatctcaacagggattttcctgaccaattcttccccgttaacaacgatattgactacagacagcctgaaactagagccattatgaattgggtaaagcaagaacacttcacggcttctgctancttgcatggggggg

SEQ ID NO: 16771 - DNA, 415 bp, Zea mays
  Clone ID: LIB83-015-Q1-E1-G8
cccacgcgtccgatggagtctctcgagcttgactcttttgggctttcgattgtcgcttctagcttggtaagcacgtactgtttatttgtcgaagacgtgctggatatagtctctgatacagtcgtggtgcatgaagacgccgtctcacgggttcaacggttaacacagggcattttgggcactcaaaacatccacgggcctgatggtgagattgacgagtacggtagatttggggggaggggaagggggaggaggaggagagcaaatgtgcagggaaagtctggtggccgagaactccgcagcgaatcgaagcatcgggaggatgaatgggacctgtcgatgggctacagacacagattcgccatgacagcattcagtctagtggtattgtattgccagacaagtacatgcattg

SEQ ID NO: 16772 - DNA, 417 bp, Zea mays
  Clone ID: LIB83-015-Q1-E1-G9
acgacgcgcagcgagagcgcagcctgctgcgggactggctgctgcccgtggagggcgcggtggcgctcagcatcgtgctggccttcgcgtggcagaaggccgtgcgcgcgtggccgcgcgctatggtgcgcgtcatcctctggtccagcttcggtgtgaccctggccgtgggcgcgctgctcatgtgcttctcgatgctggccactgtggggctgggcgtggcgatggtggtgttctccatcggcaccgggctgtacgcgtgctgggtgacgcggcgtgtgggcttcacggcgcgggtgttcgagcgcgcggtgcagccggtggataagttccacggtttgaatggccccgcgtacctgatggtggcggccggcttcgcgtggatctcggtgtggtgcgtggcggtgatcggagctg

SEQ ID NO: 16773 - DNA, 432 bp, Zea mays
  Clone ID: LIB83-015-Q1-E1-H1
cgggtccactaagcgtccggactaccctagtgggcaaatgtgctcctccagatatgctgcagttgctaacgtacctcgccatgaagcacgacacacgagtgaagcgggttgacactgttaaagcttacagctttggagctctcgactttgtagaggttgacatcgaactagcggaagatatgcggctgagagaggcgcacgccatcggtgaatcgctgcaggagagaatcgacaagttgcctcaagtcgagcgggcgtttgttcatatcgatttcgagagcacgcataagcctgagcacaaagtcagggacaaactgccgtctactgatccctgacagatttccgaatgctcatgcatgtagtacattgttaagagatagtagctaataccccggcgttttcttcgaaggttacgagcaacgattcccttca

SEQ ID NO: 16774 - DNA, 399 bp, Zea mays
  Clone ID: LIB83-015-Q1-E1-H10
cggacgcgtgggcggacgcgtggggaaagcgtagagctagtcagagagagagagagagagagagagagagagagagagagagacggggggcgggaggatggctttgctgcagagccagagcctgccaggcattggctgctgcagcagcagcatcgtcttggcacgagcgagggtgcagcagtgtctggcagcggcgtcgcactcacaggcgcccctcctgcaggccaatggcggcagggcgggcctcccctcctcctcctcgatccttaaggctggcaatgcgatcagcttcagccggcggagaaggagagacctgcgcgtcgtcgcggaggcggccacggcggggacggccaatgtcacgccggcctcgtctggcggcgtcagcctcagcgacgtgct

SEQ ID NO: 16775 - DNA, 366 bp, Zea mays
  Clone ID: LIB83-015-Q1-E1-H11
ctgggatcgccattgggtcctcgatcctcgttggggttaggcacggagaaaattccttctctgtggtagggaacaaggacaagggtgcatggattttcttcaaaggtcttgtttagatactctagtatgcatcacaatccacaggtcttgtttagatactctagtatgcatcacaatccacatatgttgaggtgcattggaatgtaaaattaaattaatttatactccaatccatatcaatacatatggatttgggtggatactagagtacccaaacaaagcataaatggggcggttacgaggagacattcctagcaggaatttccctttttcatctcgaattaccctaagatgggtaagagtttg

SEQ ID NO: 16776 - DNA, 382 bp, Zea mays
  Clone ID: LIB83-015-Q1-E1-H12
atttgattacagctggccatggacgcgaagcagcatttgctgccgcagttctgggagataatgccctaatggagaaagcatggcaggacacaggaatgttagctgaggctgttttacatgctcaggcccatggtcgtccatcattaaggaacttggttataacatggaacaagatgctacaaaaggaactggatcacacaccgactgtaaaaaccgatgccgccgccgcattcttggcttctctcgaggatccaaagctcacaagcttgggggaaactgagaaaaagcctcccatcgaaatacttcctcctgggatgcctcccctatctgcacctccgatcgtgattaaaaaggctggagcaaaacctggtctccctaatgc

SEQ ID NO: 16777 - DNA, 444 bp, Zea mays
  Clone ID: LIB83-015-Q1-E1-H2
aaggtatcaacgtgaagtacttctggggtagcacgctataccacgtggaagaccttcccttccgcctcgaggacatgccgtccaactatggcggcttcagggaggccgtgaaggggttggaggtcagaaaggtgctggaggctcccgaggaggtcaagtgcgtgcccatgaagaatgtgctcgagcccggtgacatccccacgcttgctgagctcgggctcactgcgccaccagccatgtcacaggactcaaaacctgctgttggctctactctcattggtggtgagacagaagctctggagaggttgaagaagtttgctgcagaatgctctatgcagccaaacaaagtagacaaaagcaatacccaagatagcatatatggtgctaatttctcttgcaaaatttctccatggcttgctacaggttgcctctctccacgggtca

SEQ ID NO: 16778 - DNA, 405 bp, Zea mays
  Clone ID: LIB83-015-Q1-E1-H3
cacacgcgtccgggcccagggccacgtgaaagtcaggcattgttggcgcccaattgaccgccggacttgtcagtgatgcggatcggcgacgtgaacgtgtctggccgtgcgctcccccaatggcctcttccgcggaagcgtggctctggctccttcgtcgacctgtcgtgcgtctctgtatctaattttggatgctcgccgacgccgctagatagctgtttggatgccgtgccgtgagaaatggcgatcgtttttgtgccctcttgctcgagcagatgcttgtccttgttataaaaaaaaaccctgcgaggtgttatataggccagtgtggggttctatctttttctccaataaatatgtagccctttataataactaatgaataaaagataacgcaagaaaaag

SEQ ID NO: 16779 - DNA, 424 bp, Zea mays
  Clone ID: LIB83-015-Q1-E1-H4
caagtcaggatccagagttgttccatacagcggggaacgggatggtgactcggaagagacggctgagactgaggacgcgcccgaagaatttcagtcagctcacaaagatgaggacttgtcgaagatcaggatgcagctcgttcagattgagaatcagcaagccagtttgcttaatcttctccagaaattcatggggagctcccagaatgggatacgttccttggagacaagggtgaacgggctggagatggtgttggacgagatatcccgtgatttggctgcttcctcgggaacgattccgaacagcgagcctgacacaaacgcttgctgcattctgagcccaaagttctggataacgcatgacagacgtacgtacacttccaggtaccctatatcggacgcagcatactactccgaagagagc

SEQ ID NO: 16780 - DNA, 435 bp, Zea mays
  Clone ID: LIB83-015-Q1-E1-H5
cccacgcgtccgcgtcggcggcgtcgtcaccaactgggcgctcgtgtccatgaaccacgacacgcagtcctgcatggaccccaacgtcatggaggccaaggtcgtggtcagctcctgcggccacgacgggcccttcggcgccaccggcgtcaagaggctccaggacatcggcatgatcagcgccgtgccggggatgaaggcgctcgacatgaacaccgccgaggacgagatcgtgcgcctcacgcgcgaggtcgttcccggcatgatcgtcaccggaatggaggtcgccgagattgacggcgcccccaggatgggcccgacgtttggcgccatgatgatctccggccagaaggcggcgcacctggcgctcaaggccctgggcaggcccaacgccgtggacgggaccatgtcgccgccgttgcgcgaggagttgat

SEQ ID NO: 16781 - DNA, 378 bp, Zea mays
  Clone ID: LIB83-015-Q1-E1-H8
cggacgcgtgggcgggcgcgtgggcacaactgcagtgtaagtagcgctacgcggccggggagagatcgggaaagcgggaagcaaggactatggcgtctctgctcagcctgtactgcggcgacgccgccggcggtcggatgacgatgagccgaggtcgcggcacagcgcctgcgccagtgaggcgtctgctgacgaagctgaggtccagcttcatcagaccgagcgctgctcggccgatgactaaggcggcagcgatgttcgcctactacctgcgcagctactcccagaacttcgacgactgcgtcatttcgtcgtcagctccggcggccactgctcgtgcgtacctgcgactccagtatgattctgcttcttctgtgt

SEQ ID NO: 16782 - DNA, 308 bp, Zea mays
  Clone ID: LIB83-015-Q1-E1-H9
ttcagaactcacaaacacgcctgctccctcttcgagaaatccaacctactatccaaaccgtctcccgtgtgatgcgtcgccgtcgaagagtcaactcgcctatccagatgcagacataacaaaaatgagagagtatctagctaagagcgtcgccggcgatgctctgctccggacgcatgctggcctgcaacggggtcttgcccagtcggctccagctgccgaggggcgacgcctaacacctgcgtccatcagcgctcgcgcggaagtggcgcgtcgtggcctccgctgcggagtccagcgggtcccct

SEQ ID NO: 16783 - DNA, 434 bp, Zea mays
  Clone ID: LIB83-016-Q1-E1-A1
cccacgcgtccggcgcgcgacctctacaaggccggcgagcggcggctgggcaccgacgagcgcgccttcatccgaatcttcagccagcggagctgggcgcacatggcggctgttgcccgggcgtaccaccacatgtacgaccgccccctggagcgcgccgtcaagagcgagacgtcgggcaacttcggtttcggcctcctcaccgtgctccgctgcgccgacagcccagccaggtacttcgccaaggagctgcacagggccatgaaggggctgggcaccagcgactcggtgctcatccgggtggtggtcaccagggcggagatcgacatgcagtacatcaaggcggagtaccacagcatgtacaagcgctcgctcgccgacgccatccacgccgagacgtccggcaactaccgcaccttcctcctctccctcgt

SEQ ID NO: 16784 - DNA, 405 bp, Zea mays
  Clone ID: LIB83-016-Q1-E1-A10
atttcaagcgaagtgttatcatttttagtgggacaaagcaatctgcacacaggttaaaaataatatttggtctctctggcatgaaagcagctgaacttcatggcaaccttacacaggcccagcggcttgaggctctggaacttttcaagaaaaaagaagtagattttttgattgcaactgatgtcgctgctcgtgggattgatattgttggtgttcagactgtaataaatttcgcatgcccaagagatgtgaaaacttatcttcatcgtgttggccgcactgcgcgggcaggaagagaaggctatgccgtgacatttgtaaccgatgatgatagatgcctcttgaaagcaattgcaaagaaggctggttcacagctgaaaagtcgcattgttgcagagaaacctg

SEQ ID NO: 16785 - DNA, 374 bp, Zea mays
  Clone ID: LIB83-016-Q1-E1-A11
gtaacttcagcaagagctgggaaaactaagaagacaactgttgctgttgcacctacattcgtctgtgctaatcgtgctgagaagagaggagagttttacacaaaattagaagaaaaacgcaaggctttggaagaggagaaactccaagcagaggccagaaagagggaagaggaagaagaagctctaagacaactgaggaagaacttggtcgtccgagcaaaacccatgccaagcttctaccaagagggacccccaccaaaggttgaacttaagaaggtgcctccaactcgtgccaagtcaccaaaattgacacggagaaagagctgcagtgaaacccctcatacaccagagggaggaaatggcagtgcagtatg

SEQ ID NO: 16786 - DNA, 374 bp, Zea mays
  Clone ID: LIB83-016-Q1-E1-A12
accacgcgtccgcccacgcgtccgctagcgggagcttataatccacttggaaaaggactggcaggtgcttacaattcccctggaaacggactggcaggtgcttatggcgtgctttctgctcatgccgcacagccaatgttgtatgctccaggtgcttctccaggttcaacaatgatcccaatggtcctaccagacggccgtcttgtatacgtaccacagactgcagggcagcagcctctgcatgtgacttcgcctctgcctcagcaaggcggtcgtcgattcggcggcggtggcggatccagctccggcggaaagcgacagaggggagatgaccgtggcagtaacagcaacagtagccgcaggggctggcaccg

SEQ ID NO: 16787 - DNA, 431 bp, Zea mays
  Clone ID: LIB83-016-Q1-E1-A2
catggtataccagaagaatggatgcatgaagctctggctctttatcacgaatactatggagataaacagggcgcactggagaatttgattcagtgtggcaactggaagaaagctcatactattttcgtgacttctgttgctcattctatgtttctgtcatctaaccatcaggaggtctggaggatcacaagtgccttggagaaccacaagtatgaaattgctgactgggaccttggtgccggaatatacatagacttctacgttctgaagaactcaatgcaagaaagaaatgccatggatgattcgggttcactcgaggagatgagtgaatcatgcagaagtttctttggccgattaaacgagtcgttgttagtctggggaagcaaattacctgttgagtcaagggcatgctactcgaagatggtagagga

SEQ ID NO: 16788 - DNA, 437 bp, Zea mays
  Clone ID: LIB83-016-Q1-E1-A3
caggcacgcgtccggcaaagtccatattgattgctgcaagaaaaaaaatgctgagattaatcatcaccatactgtttaagtttccccatgcttcaatgtctcgctggggctgatgacttaggaagatggactcagttgctcgaaggctggaagagaatttatgggatcaaaacatgatcggaccttggaactaaaaactccaaccaagaaaacggaaaccaaatacacaacggggctcatgaactggacgagcaaaagcacatgccatagatgctgtattactgacatactgctctactcgccttgcaaaactacggcctttatcctgcgtctctcgctggcttagagccatttgaagagaatgccaccatgggcagcgaagaagggggcgaagacaagggattcaaccgccataagcttgatgaggatgttgaagg

SEQ ID NO: 16789 - DNA, 410 bp, Zea mays
  Clone ID: LIB83-016-Q1-E1-A4
cagacgcgtggggtgccccaagaacgcgctgaaactgggcgtgtgcgccaacgtgctgggcctcgtcaaggtgtccatcggcaaggtgcccaccgactcgtgctgcccactgctggacgggctcgccgacctggaggccgccgtctgcctctgcaccgcgctcaaggccaacgtgctcggcgtcaacctcgacgtccccgtcaagctcaccctgctcctcaactactgcgggaagagcgtccctcagggcttcctgtgcgcctaatatatatactagtggctagttcgtcactagcttcagttgccatgcatatttgtgattcttcttctttccttctagttcaccactgtatgtacgagcctcctccggatgttttctttggtattgccttctcttctactcttctcct

SEQ ID NO: 16790 - DNA, 431 bp, Zea mays
  Clone ID: LIB83-016-Q1-E1-A6
cggacgcgtgggcggctcaaagatagcgcgccgtttattgggaaaaatcctaatcgatctacgcaacactcgtgaagaagctatcagtgttgccgaaccaaaatttattgaagacgaagctctattcctaccaacaagagaagcagagcaccagcagaaggttcatgttagaaatgaggatggaagaagatctagctctacgagtgagaagtcattggaccaagaagatgaagatgatagagaaactaaataccgattagatcccaagtatgccaatgtaaggacacctgagcgccatgtccgcactaggctttacttcacatcggaatctcatatacactcattgatgaatgtccttcgttactgcaatttggacgaaagtctacaaggagaggaaagccttgtctgccagagtgctttggaccgtctac

SEQ ID NO: 16791 - DNA, 198 bp, Zea mays
  Clone ID: LIB83-016-Q1-E1-A7
ccacgcatccggataccctacgtacgtgtaaccgattcaccgaggtcaccgtttgtgtgccgaaacaattggcaaggtactcagtgtgttccgaatcgatcatggcaaagaacaatgctccggacgaccgagcgtgccggcaccaataacgagcggcaccagcacgagcaggaccatgacgatgtgctgcaggagcac

SEQ ID NO: 16792 - DNA, 302 bp, Zea mays
  Clone ID: LIB83-016-Q1-E1-A8
atcaacgccgtgccgctgctccccaagatcctggagctcgttgggctcggctacaccggctggttcgtgtaccgctaccttctcttcaaggaaagcaggaaagagttggccgccgacattgagaccttgaagaaaaaaaatagctggaacagaataaacgctcatggaaagttttagagcgtcctttcttctttggaaagagatctattcgatcggagaaccaatgcaactacttgagtactattattgcccatgtattgtgtgctgtatatcttctgtatacaaaggaaggttcgtttgtt

SEQ ID NO: 16793 - DNA, 414 bp, Zea mays
  Clone ID: LIB83-016-Q1-E1-A9
cttccgttctcaaaccaacctaggcaattcgccgcagcctctcaccctcgcgagtcccgacctcccgcagccgccgcacagatggcacccaaggcggagaagaagccggcggccaagaagcccgcggaggaggagcccgcgacagagaaggtggagaaggctccggcggggaagaagcccaaggccgagaagcgcctcccggcgggcaagtccaaggagggcggcgagggcaagaaggggaaaaagaaggcgaagaagtccgtggagacctacaagatctacatcttcaaggtgctgaagcaggtgcaccccgacatcggcatctcgtccaaggccatgtccatcatgaactccttcatcaacgacatcttcgagaagctcgcggccgagtccgccaagctggcgcgctacaac

SEQ ID NO: 16794 - DNA, 435 bp, Zea mays
  Clone ID: LIB83-016-Q1-E1-B1
ggtggccaggtcattcaagttatgcacaagtgattgttcctcccgggcttgttcaggtcccagggtggagtccttatactgcgcaaattggttcttcatcctcggaggaccaacaacggacacctggagctgctcaatactatactggctcacgccaaagtggtactagtataggcgatcaaggaatgttttcatcctaccaagcaggttctgttcctgttggactttatgcagtacagagggagaatttatttccagagagacctgaccaacctgaatgtcagttctatatgaagaccggagactgtaagtttggtgctgtatgcaagttccatcatcccagggagcgaataattcctactcccaattgtgcactgagtccattaggcctacctttgcgcccgggagagccaatatgcagtttctacaatcgct

SEQ ID NO: 16795 - DNA, 408 bp, Zea mays
  Clone ID: LIB83-016-Q1-E1-B11
cccacgcgtccgcccacgcgtccgcggacgcgtggggccccgggtgttcttcctcgacgtcaaccctctatgcttccgcggctcccaacgtagcctcggcgccttcgcgcgctggctggccctcttcttcgcacacgtcagcatccgtgaccccgtcgtcgctgttttggacggggatggagggaacgagtaccggaggcggctgctgccttcgtacaaggcgcatagggctcgcggcgtcggcactggcgctgacacgcgcgtcgtcgacgttctccgccaatgcaatgtcgcggttgtaagagtcgatggatatgaggctgatgatgtggtggctaccttaacagaacaggttttacagaaaggttacagagttgccattgcctcaccggataaagacttcaagca

SEQ ID NO: 16796 - DNA, 381 bp, Zea mays
  Clone ID: LIB83-016-Q1-E1-B12
caatccagaagcgaagataatatcttccccgttctcgccgatggctgcaacaccaacacccactgccgccgttttgctcgcgcgcccgctcatcgcactgtccagtgctttcacctcccctcatcgtgcgcgggtgccgagcggtccctcctccatctcggtgccgccactgaggagtcgatggtgccagtggcgcggcccgctccgatcgctgccccccgaaggatctccggccgagctgatggaagaggactccaagtttgtgccgttgaacgcggacgatcccatgtacggcccaccggcgctactgctcatcggatttgagaaaggcgaaactgtcacgattcaggccttcctgaaagagcttgaaggtgaattcct

SEQ ID NO: 16797 - DNA, 432 bp, Zea mays
  Clone ID: LIB83-016-Q1-E1-B2
cccacgcgtccgcagcttcctggtcggcgagtgggaacttgatctcactgttgtgtaactgcttgctgttgtccctcttgcacaacatggtacatggagacatggcatatctttatctactttatatagaaggagcatgctttgccctggtttctcactcttgaacttgcatataagcccattgatgtaaggagagtgcaacttatcatataaactctttgatgaggttcttgatgatgttctaatctacaaatgtgttagaagatggccggatcctgtgtgactggcaagatttaccatttaaaaactatgcccccggagaatgaggagaattctatccgacttattacacgttctgatgccacatttgagaagagccagaactgagcacctacaacccttttaagttaagtaacacaagttgaattcatg

SEQ ID NO: 16798 - DNA, 433 bp, Zea mays
  Clone ID: LIB83-016-Q1-E1-B3
cccacgcgtccgcccacgcgtccgcagaaaaatctgttggcactgatgacatatgggaaaaagcaacaattgctttgaagaatgcattagatgataagggttgggaatacaaggttgatgaaggtggaggtgctttttatggtccaaaaatcgatctaaaaattgaggatgctcttggaaggaaatggcaatgttccactgtgcaggtggatttcaatttgcctgaacggtttgacattacctatgtcgattcaaactctgagaaaaagcgacccatcatgattcatagagctatccttgggtctttggagcgcttctttggtgtcctgattgaacactatgctggtgattttccactttggcttgccccaacccagacacgtattctacctgtgacagacaatgagttgcaatactgtaacgaggtggcctc

SEQ ID NO: 16799 - DNA, 339 bp, Zea mays
  Clone ID: LIB83-016-Q1-E1-B5
cccacgcgtccgaacctggacatcgtggactgggagctgagcgaggaggagaggcagcgcatcagcaagatcccccagcggaagatcaaccagggccgtcgctacgtctccgagcacgggccctacaagtccttcgaggagctatgggacggcgagatatgatatgagtaaacgttacgtcggcgccccgctaggcggctgccttgcgtgacggagcaacgagctccccgttgtgacagtgagcggctgcttttgtggttttatgccgtgccatctgtgcaacaaaaagtgatgctttagtgtcacagtatgtgtgaaataaattaaaaaggattttct

SEQ ID NO: 16800 - DNA, 405 bp, Zea mays
  Clone ID: LIB83-016-Q1-E1-B6
cagacgcgtgggttcgagagcctcactgacaagagcaagctcgatgcgcagccggagctgttcatccacattgtaccacacaaggcttcgaacacgctctccatcatcgacagcggcatcggcatgaccaagtccgaccttgtcaacaacctcggtaccagcgccaggtccgggaccaatgagttcatggaagcccttgctgctggcgctgatgtgtctatgattgggcatttcggtgtcggtttctactctgcctacctcgtcgccgagagggtcgtcgtgaccaccatgcataacgatgacgagcattacgtgtgggaatcgcacgcgggcgggtccttcactgttactcgtgacacgtctggggagcagcttggcatgggtactaagattacacttttcctc

SEQ ID NO: 16801 - DNA, 409 bp, Zea mays
  Clone ID: LIB83-016-Q1-E1-B7
cccacgcatccgcagacgcgtggggtgagtgaacaccagccgtattgtcccgactcctgacccctaccgatcctcgcctgctgcagccatggcgacctccgcggcgctctccaccgccgccaatcccacccagctctaccggtcccgcgcttcgctgggcaagccggtgaaggggcttggcctgagcatgggccgcgagcgcgcccagcggatcattgtgtgccaggcggtaagcatcatctccgccgaccgcgtccccgacatggacaagcggaagctgatgaacctcctcctcctcggcgccatctcgttgcccaacgtctgcatggtcgtcccctacggcgccttcttcgtcactgccggttccgggaacgccggcggcgggacctacatgaaggacaagttgggc

SEQ ID NO: 16802 - DNA, 428 bp, Zea mays
  Clone ID: LIB83-016-Q1-E1-B8
ggttcttcaagcagatcctcaacagcatcctgcacgcgcccatgtccttcttcgacaccacgccgtccggcaggatcctcagcagggcgtcgtcagatcagacgaacgtcgatctcttcctgccgttcttcgtctggatgagcgtatccatgtacatcaccgtgatcagtgtgctgatcgtcacgtgtcaggtggcgtggccgtccgtcattgccataatccctctggtgatactgaacatctggtaccggggctattacttgtcgacatcgagggagctgactcgcctcgagtcgattaccaaggctccagtgatccaccacttctccgagacggttcaaggtgtcatgaccatcaggtgcttcaggaaggaggaaagcttcttgcaggagaacctgaaccgggtgaactcaagcctgaggatggac

SEQ ID NO: 16803 - DNA, 407 bp, Zea mays
  Clone ID: LIB83-016-Q1-E1-B9
cggacgcgtgggcggacgcgtgggcgaccccgaggccttcgccgagctcaaggtgaaggagctcaagaacggccgcctcgccatgttttccatgttcggcttcttcgtccaggccatcgtcaccggcaagggcccgctcgagaacctcgctgaccacatcgctgacccagtcaacaacaacgcatgggcctacgccaccaacttcgtccccggcaactaagctcaacggctatgctatgcaacttcattgtctttcggatcggagagggtgtacgtacgtggattgattgatgctgcgagatgcatgtgtgtcttttgtttcacgttgcattgcataggcaagtcgagatgatgagttggcgttgtacactaagatgaaccatgtttgtgcaatagtggtggttttt

SEQ ID NO: 16804 - DNA, 407 bp, Zea mays
  Clone ID: LIB83-016-Q1-E1-C10
acctcaccgtgtggcagctcgtcagcatcgagcctgggccgtggaccgagagcgtccggcgcgagtacgtgaagctcgtcgacggcttcttctccatccccttccccttcgcctccctcctcccgttcaccgtctacggccaggccctcaaggcgaggaagaaggtggccggagctcttcgggaggtggtaaggaagaggatggacgacaaggcggaggacgactgtggcgccagtaagaagaacggggagaagaaggacatggtggaggagctcctagaagcggagggcgggagcttctccgtggaggagatggtggacttctgcctgtccctgctggtggctgggtacgagaccacctccgtgctcatgacgctcgccgttaagttcctcaccgagaaaaccaac

SEQ ID NO: 16805 - DNA, 319 bp, Zea mays
  Clone ID: LIB83-016-Q1-E1-C11
aggacgcgtgggcaacgaagtgcgagcgacccacgtccacacgacacgaaccaccaccaccaaccagcagccgcaccacgcacccagcgcaaagcgatggcgtcgctcaccatgatggcgtccttcgccgccgtggcggtggccgcgccctcgcgccgcggcaccttcgccgtggtcaggtccgccaaggtcgaccgctgccaggagcccgccacgctagcagcaaccgaggccaggcccgccgccgacggacgccgcgccgtcatgctcgcggctgctgcggcgggcgtggtagccatccgcggcgccggcgccgcca

SEQ ID NO: 16806 - DNA, 411 bp, Zea mays
  Clone ID: LIB83-016-Q1-E1-C12
gactagttctagatcgcgggcggccgctcgcgatcgggtgtcgctgtgaatgacgagtgcatgctcaagttcggcgagctgcagtcgaagaggctgcaccgcttcctaactttcaagatggacgacaagttcaaggagatcgttgtggaccaggtcggggatcgcgctaccagctacgaggacttcacaaacagcctccccgagaatgactgccgatacgcgatctatgatttcgactttgtcactgcagaagatgtccagaagagcaggatcttctatatcctatggtccccatcctccgccaaggtgaagagcaagatgctttatgcaagctcaaaccaaaaattcaagtgggctcaatggcattcaggtggaactgcaggctactgatgcaagtgaaatcagccttga

SEQ ID NO: 16807 - DNA, 429 bp, Zea mays
  Clone ID: LIB83-016-Q1-E1-C2
atccatggggaaccaggtagcaagagagtatgcaggcaatcctcagcacatgacaccaagtattaccatgcaatgcgacacgagctcattgatccccggaggccagttcagtggtggttcctccgtgcagactcaaacttcacggagctccaacatgcttgcgctgcggccaacgcagcagcctcaaaacttggacttctctgggcttggtcagtccacacagccttcagggaccaaccctttcgccgactggtctcggttgcaggagagcagcgtcgatgagtacttgatggatgagataagggcgacgagccacgagctattggagaacgatgagatgcagcatatgctgcggttcctgagcgtgggcggggcgccgaccggcctgaacaacgttgacggctttccttcatacgcgtctcctgcccc

SEQ ID NO: 16808 - DNA, 435 bp, Zea mays
  Clone ID: LIB83-016-Q1-E1-C3
ctgcttctcattctcccgtgcacttccagttcctgcccagctgcagggctgctccaatggccaccttgtccgccatctctgccaacgtcggctactgcaaggcaccaaccctgagctggaagggaagcggagtaccaggccggattgtggtctccatgtccaccacccgaagaggcctcgtctccctaagacgacgatcccctcggtttcgcgtctacgcggcgaatgcggagacggtgagcaaagtgatggacatcgtgaagcagcagctggcgctggcggcggacgtggggctgacggcggagaccaagttcacggacctcggcgccgactcgctggacacggtggagatcgtcatgacgctggaggaggagttcaagatcaccgtcgaggaggacaatgcccagagcatcgccaccatccatgacgccgccg

SEQ ID NO: 16809 - DNA, 449 bp, Zea mays
  Clone ID: LIB83-016-Q1-E1-C4
ggtccacgcacgcgtccgcacacgagtccgcccacgcgtccggaccgcggagcactcggtgaacgccgcgctcggacagtttgagcactgcttcgtcgaccgcggctgcgctgtcaatacccacctcttctccatgattgataacatggatcgacttcttgaggtaataaagcaagcagcacaggaaggggcactggttctatatacccttgctgatccttcaatggctgagtcaactaagaaggcctgcgatttctggggtgttccatcgactgatgttctacggcctactgttgaagcaattgcttctcatatgggtgttgctccatctggaattccacgaagttctcctagtcgacagggtcagttaacagaggattactttcgacggattgatgctatcgattttaccatcaaacaagatgatggggctctgccacagaacctca

SEQ ID NO: 16810 - DNA, 428 bp, Zea mays
  Clone ID: LIB83-016-Q1-E1-C5
gatgctgcctacttgcttgctgtcctcgctgggaacgccagcccctccgctgaggatttgactgccattctggagtcagttggctgtgaagttgacaatgaaaggatggaactcctgctgtcccaactgagcggtaaggacatcaccgagctcattgccgcgggcagggagaagtttgcttcagtcccatgtggtggcggtggtgtcgctgttgcggcagcttcacctgctgctggcggagctgctcctacagctgaggcaaagaaagaatagaaggtggaagagaaggaagaaagcgatgatgatatgggcttcagcctcttcgactaggctgcacagtcatcacagtattgtttcgggcagtgaaaccataggaaaaccagagtcatgtttagattttaaccttgttttatgttggaaagtactgc

SEQ ID NO: 16811 - DNA, 413 bp, Zea mays
  Clone ID: LIB83-016-Q1-E1-C6
cacacgcgtccggctgctgctcctggcctgctacgacctcacggccacctctgtcctgtcccactagactagctgcagctagcgcctctttccctcgccgccgccccctatccgagagcgacgagcatggcgcactccctcgccgcctccttctcgccggccgccgcgcggagccaggtgacaaatgtgatttcaagccggagctcggtttccttccagagccacaggatgacttctgtatccatcggttcaagaccaagttctcttcggttcatgatttgctgttcggctaaaacggcgacagtcgacaaggtctgtactacagtgaaggagcagctggctcttctcgatgggactgctatcactggtgatgcaactgtcggcgaccttggtgctgattcactggctacggt

SEQ ID NO: 16812 - DNA, 330 bp, Zea mays
  Clone ID: LIB83-016-Q1-E1-C7
atccggagacggcacgcgacgcaactatcctcgagagagagagagagagagaggaagcccgtcgttctggaagtttccacgctccgcgcctccgccccctggtctgagtggtctccgctccaatggcgccctcactcctcgccgccatgtccacctcgcccttccgagccagcagcggcagcagccgcaggccgctatgcgctgcccacacccgacgggctggactgcgcgtgggcgcgcttaattacgaccctgccaaggttgcgccgcatcacgacgcggttctcgtccgtcttgagcagatccctggaaaatctgctgagtgtgtgt

SEQ ID NO: 16813 - DNA, 185 bp, Zea mays
  Clone ID: LIB83-016-Q1-E1-C8
caaggaggaggcgcgcgcgtcggcgccggccgatggccttgaccccgccggcgggggccccgggggcgtttagtgggtcgtcatgtcgccgccctgacccgcagaaccatgctcacgccgcgcgcctcgcctatgtgctcgccgtgctctacatcgccacggatgcgctcatcaagcaggatctc

SEQ ID NO: 16814 - DNA, 403 bp, Zea mays
  Clone ID: LIB83-016-Q1-E1-C9
cccacgcgtccgctagcctaaacttggagagaatgaaaggaatacctgaaccacccaaaccactccctttcttgcgtgctcttgagagttgctaacattttggtaccagagccaacatggatccaccacacgagtacttcacgagggcataagcaaagggcggagtgatggcaccaccgcgagtggaggattccttgtcgtggttgatggctaagatcgacgaaggcaacaaggagacatacaagcggacgcactctatacagtccgccatggagaatttgaagaataccgtcaagagcctagtgactgatgggagtgacttcaagaggtggataccggagatcgaagccaaggtggtggagatgacagaagtgctgaagacactctagctcaagtgaacacg

SEQ ID NO: 16815 - DNA, 155 bp, Zea mays
  Clone ID: LIB83-016-Q1-E1-D10
aggacgcgtcggtcactccgttcagtggatctcgcatgagtccttgggtggggctgtctatgccgagttcggacactggggcctatttcatcttacggggttctcagtcgggaagtgctgttctctcttcatcctctcgctgctgagtattgcag

SEQ ID NO: 16816 - DNA, 373 bp, Zea mays
  Clone ID: LIB83-016-Q1-E1-D11
aggacgcgtgggcggacgcgtgggcggacgcgtgggcggacgcgtgggcggacgcgtgggctgggccacccacctgagcgacccgctccacaccaccatcttcgacacgttcggagggtcctcttaagcccgccattgctccgccccgtccatcgaccggccggaacgtgttcttggattaattaactacgatctctatgatcctggggatggatcaacccgtcgtgcgtggtctcgttttgtgatgagtgggagagagaggatggcaagatcgatcctttgttaatggagatctcgttaattaggagagctaccgctgggacttggtggtttgtaatatatgattcaaccattgatgaatcaatgcattcac

SEQ ID NO: 16817 - DNA, 397 bp, Zea mays
  Clone ID: LIB83-016-Q1-E1-D12
atcatcgcggcccgttacgccggcaccctattgccttatccatcctctgccgacgtcggcgccttcgactcgtatgtcggcgcgagacgatccgcggaagttctctatcaccaatcttttatgggaagtcatagtactgttggccagaatgaggctttatattcatcgaatactatggctaaacgccctaggcttgaaagcagccttcctatatatccacaacgaccggggcaaaaggactgtgccttctatatgagcactggaacctgtaagtatggagagacctgcaaatttgaccatccacaacgggttccagagggtggggttccaaactggaaagaggccccgaatgttgaagattcttatcctgagcgaccaggggaaccagattgtcctt

SEQ ID NO: 16818 - DNA, 431 bp, Zea mays
  Clone ID: LIB83-016-Q1-E1-D2
gatccagggcccacctcccaacggcgacaacgcctatgcttacccgccgtccattcatagcgccatgctctccccgtccccatctcatgccccaccgtctccccatccaaatgaagggttggcgattgttcctcaagggccatatccgtatggtggcagttaccaaccttctgagagcgtcgggagggatgtactggatgaggtggagatccgacagctactcattgaccatattggacatcgatgctgttggggaagtcaccctgcccgcacatggaaaattacctccattgaggactgcaatgtctatgttggcaccttggaaaccttcatcgaggaaagatacattattacaaaaaaggagccctttgaaagtgggaatatagatggaagagaaaaaggtcctttgcctggattgtgggaacttgatt

SEQ ID NO: 16819 - DNA, 426 bp, Zea mays
  Clone ID: LIB83-016-Q1-E1-D4
aagagagagtaccaaattctcaaggagctcagtctgagaatgatcctaacaataccactatatttgttggtgggcttgaccccaatgtcactgaagataccctaaaacaagttttttctccttacggtgaagtcgtccatgttaagatccctgttgggaagagatgtggttttgttcagttcgttaccagaccttctgctgaacaagcgctgctaatgctgcaaggggccttgattggtgcacagaatgttcgactttcatggggtagaagcctgtcgaacaagcaggctcagcctcagcaggaatccaatcaatggggtgcggctgctggtgctggtggctactatgggggctatggacaaggttatgaggcttatggcagtgggtatgcacaaccccaggatcctaacatgtatggttatggcg

SEQ ID NO: 16820 - DNA, 322 bp, Zea mays
  Clone ID: LIB83-016-Q1-E1-D5
cacacgcctcgtcgtgaccgaggcagccaaatgccgtattcaacatctgtccgagtccgcaccttcgactgctctatccgcgccagacgatccgggggagttctctagcacgacgcctttatgggaactcataccactgttggcgagactgaggcttaatatgcagcaactagcatggctacacgcactaggcttgaaaccaggcttcctatgttgccagatcggccggagcagcgcgactgtgccatcgatatgacgcactgatacctgtatgtatggatagacccgcaaatttgcctatccacaagcggggttccaaagg

SEQ ID NO: 16821 - DNA, 421 bp, Zea mays
  Clone ID: LIB83-016-Q1-E1-D6
aagacgcgtgggtggtgatggaggagacgatagacgacagtgagatgagtttgtcgaacatggtgctgggcttcctggaagatttcgagagggacgagcgacggccggagaacgacgacgacaacaacgaggaagagggctccagcggcggcgacaccgccgagagcaaggccttctggcagacccaacacttgcagctgcgcgaggcactggccaagggcagcccagccgagagcaggatccgcgcggacacggaggaggccgtcaagagcatgcgcgccgcggcctgctcctgctcctgcacggggcggcccgccgcccgggactgccggccgtgcatgcaccggcacgtcgccgaccggctgcgccacgccggctacgacagcgcgctctgcaaatccaggtggacgcgctccccgga

SEQ ID NO: 16822 - DNA, 388 bp, Zea mays
  Clone ID: LIB83-016-Q1-E1-D7
catcgactcgtctcgctagtggctgccctactcgtgctgcttgccctcgccgccgtttcctccacgcgcagcgcacaaaaggagtccgcggctgacaacgccgggatgttggcaggcggcatcaaggacgtgccggcgaacgagaacgacctccagctccaggagctcgcgcgcttcgccgtcaatgagcacaaccaaaaggccaatgctcttctggggttcgagaagcttgtgaaggccaagacacaagtggttgctggcacgatgtactatctcactattgaagtgaaggatggcgaagtcaataagctctatgaagctaaggtctgggacaagccaagggagaacttcaagcagctgcaggaattcaggcctgttgaagagggtg

SEQ ID NO: 16823 - DNA, 426 bp, Zea mays
  Clone ID: LIB83-016-Q1-E1-D8
cccacgcatccgaaccagcttcggcgcgtggtacgcgacgagcccgccgctggtcctggagctcttggggtccagccacaggtggaggttggcgtccacgtaccacgaccgctgcgcgttggtcaacgcgaacccgagctcgtgctcctcgccgtccaggaggctgccgaggaagggcgtgagctcgatgtcgtaggtgggcatgttgaaggagccgatgctggtgatggggcgccagatgagcgggttgatgccgccggtgtagatcaccgggaacggccacacggcgcccaccacgtcgccgtcgagcaggacggtgacctcgcggaacggcgcgttctgctcgggcgtgttcatgtaccagaactcgtcagcgtcgtgggaccagacttatacctcgaggaccgcgcgggacgcgttgcgcgg

SEQ ID NO: 16824 - DNA, 394 bp, Zea mays
  Clone ID: LIB83-016-Q1-E1-D9
agccatggaccacgacgcctacctggggaacttggtacagccatccatggtatcagaatatgacctgggaggagaaggggacctgttcaaagctccagaagccatcatcgaggaaccgctgctcagcctcgatcctgtcgcagctgccttttcaatgatggctggcaatggaagtgctgtcatggatcaaactattaaggacgcaggcaccggcaccatccaaaatgaccccctcctgagtgaggtgctgtacgagtgcgagaaggaactcatggagaagtccacaatcgaagagacaatttctgaacttatggatgttaagattcctatgctgcaagttgaagaaatcccaagccaagctgaacaggttcttatacagaaccagcagctcccg

SEQ ID NO: 16825 - DNA, 403 bp, Zea mays
  Clone ID: LIB83-016-Q1-E1-E10
gcagtgcaaatacggccgaatctatttcatatgataatatatgagagagaattacaacgcatggaaaaagaaatccattcagacaagatagatgcaaccactcaattgtttttttttcctttccattgcttgatggcacctgcatccatgttttcttcccagcatacagcatcacataccaagcaggtcgggatcttcaggccaagaagatgccatgggccatggcacacctcctgctagctgacttctgtcattgggcgtggtcaccgtcagcctcttcttcggaagaacgctgcgaaccagcagacgcctctgccgatggcaacatagggtcatcaccttcctcgctgtctggtgctgtggcctcagcatcaccactgccactgcttgctcgcctccgggg

SEQ ID NO: 16826 - DNA, 393 bp, Zea mays
  Clone ID: LIB83-016-Q1-E1-E11
gtcaaattaatttgcgattatacaggttagcacagtttcttttgatccgtattggtcccaattaatttgcaattatacaggttagtgcagtttcttttgatccgtgttggtcccaaccaaattcagatgaaactgaagaaaatgtcatgtatcgctttgggtcagttggacaggatacccaactgcttctctgggatctggcattggacgagattgctgtccctctacgccatccttccggtgggtcaccgacattcagtagtggaagcccttctgcacactgggataatgcatgccctccaaccggtgttctccaaccctctccacggatgcgagatgtgccgaagctctcacctctcgttgcacaccgggtacatgtaaatccccaaccgg

SEQ ID NO: 16827 - DNA, 395 bp, Zea mays
  Clone ID: LIB83-016-Q1-E1-E12
cccacgcgtccgctgatctcaagcctggtcaactaacagatctgaaatcattagctgtcaataacaattcatttgcttatgtcgccgttaagaaatctatccataggtatctcataaaggattctaactatcttacgacagcggtaaataaattcgcgaattatgttaacctttccagttcagagaaagacttgttagaagaaccaacatgtccaaaggttcttggtgatattgttgaatcttgtgttggtgctgtgcttttagattctggcttcaacctgaaccatgtttggaagctaatgctaatgcttcttaaaccaatattgagcttttgtggcatgcacatcgatcctatgagagaactccgagaaacttgtcaatataatggttttgac

SEQ ID NO: 16828 - DNA, 380 bp, Zea mays
  Clone ID: LIB83-016-Q1-E1-E2
gaactccatcagatccaacgccaccagctagcagcagcagcagcagcatggccaccaccagcacgcctcgcctcgccaccctcctggtgctcctggcggcggcgtcaccgctgctgagcgcagctcaaaaggccgccccgaatgctccggcggcggcgaaggcggcgccagggccggcggcgtcgtcgtcgtccggagcgggcgcggcggacgcagtccctctcacatatgtgaacaaggcgctcaaggattaccagttcagcgagttcaagcagctgctgcacgacacgcgcgtggacacgcagatcaacgcgcagctgacggacacctacaaagggctgaccatcatggagcccagcaaagccgccttccacaacatg

SEQ ID NO: 16829 - DNA, 421 bp, Zea mays
  Clone ID: LIB83-016-Q1-E1-E3
cacacgcgtccgcccacgcgtccgcccacgcgtccgcttaacaataggacctggggatttcttggttcatcatgctattgctctaggtttgcatacaactacattgattttagtaaagggtgctttagatgcacgcggttccaaattaatgccggataaaaaggatttcgggtatagttttccttgcgacggcccagggcgcggcggtacttgtgatatttctgcttgggacgcgttttatttggcagttttctggatgttaaataccattggatgggttactttttattggcattggaaacacattacattatggcagggcaacgtttcacaatttaatgaatcctccacttatttgatgggatggttaagagattacctatggttaaactcttcacaacttattaatggatataatcct

SEQ ID NO: 16830 - DNA, 263 bp, Zea mays
  Clone ID: LIB83-016-Q1-E1-E4
cgatggtggtactggtacctcatctgttggtaagcgtaaatatactgtctgggttgtgagagagtcattttgtattgtaatatacatttgtaacagatacaaacttagtgattaaactttgagctggctgcactcttttttcctttctagggtttctcacaagggtgagttttacctagaaaggtttttaatgaggcagcattgcacaaaacagctcatttattatatttgtctatattttctactgttttttaactttggtt

SEQ ID NO: 16831 - DNA, 428 bp, Zea mays
  unsure (1)..(428): unsure at all n locations; Clone ID: LIB83-016-Q1-E1-E5
ctgatatggtgacctgcgaaaatgtcatggctgcctgtggtcacggtggcctccatggggatgccagagaagttcttgaatatatgaccagagaaggaatggtgcctactgcagatgcctacactggcctggttgaggcccttggccacgcagctatgtatgaggaagcctatgttgctttcaacatgatgactgaaatcggtagcttgccaactcttgagacctacaatgctcttgcatttgcatatgctaggggtgggctcttccaggaggctgaggccatcttttctcggatgagtaacaatgctggcattcagaaaagcaaagactcatttgacgccctcatcgaagcatattgccagggctcccgattggatgatgcagtgaaggcgtacatggagatgcgtanatccaggtttaatccagat

SEQ ID NO: 16832 - DNA, 429 bp, Zea mays
  Clone ID: LIB83-016-Q1-E1-E6
cacaagttgtgcaagggatcctcggacctcacaagtccatgtgtgaatgatgcacatatttagggggagaagtgctacaacttgaccctttgagactaaactttgtgtttgagtatacttgatgtagtctcaaaggtgcattgaaagggaaaggtgaacttggaccatgcaaagacttccactgcactccgatattagtgtactcacctccaagttcatacttatgctctcattgcctttttgctcttaattgacattttggtaacgcaatggggttaaagggccaaaaatgatcctgttttggtgcttaatgccaaagggggagaaattaaggccaaagcaaatggatcaactaccacttgtgaattttgaaaacaaaagagttagaacttttgatttgtccaaaatactcttattgcaaaatttggt

SEQ ID NO: 16833 - DNA, 320 bp, Zea mays
  Clone ID: LIB83-016-Q1-E1-E8
cactgtcactgccagcctccccttcgcttcgcttagctcgccgttaccatggcgacctccaccttctctccgcgccccgccagcctcaagcccctgcgggcacgcgccaagcccgccggcctccagctccaactcctccccttcccgcgcctcggcgtcgcctgcgccaccgtcgccggggaggcgccgcccgttgagcagcgggacgaggtggagccggcctccgccgcgggatcgaacgggactgccgttaatgtcgaggcgtccgccgcgaagcacgagtcccagcgcgcgcccgcgctggtcccggacttccgcga

SEQ ID NO: 16834 - DNA, 363 bp, Zea mays
  Clone ID: LIB83-016-Q1-E1-E9
aggacgcgtgggcgagagcaaatgctatcttcaaccacactccgaccgccggcgccggcgccggcgccggcacacctcaccatctgctcctcgcccgcagcgtggcggcgtgcgccggcggtgcgcgcggtgcgggactacgactccatcccgaagcgggagcccttcagctccagccgcagcatcctccacgagttcctcaggcaggacaagcccctcatccagcgcaccaaggaccagatcacagattattgcacggccatcgacggcgatgagtgctgcagctgttgggacgcttactttgcactggataaacttgagcaggagcctgccaaggtagaattcgcaaggctggtcaaggac

SEQ ID NO: 16835 - DNA, 430 bp, Zea mays
  Clone ID: LIB83-016-Q1-E1-F1
cgaagaaggccgggggcgggggcgggcggcgtgggtcgcgcctacccgaggcgccgggcaacctgttcgacgacagcaagcgcgggatgcccaaggacgggtggacgttcgagctgccgttcggggtggacgtcttcctcgtcctcgtctccttcacgctcatcaccaccatcatgttcggcaccgccttcctcgtgtggaagctcggcgctatacacttcaacgagtactagcctttagactgtctctacttgattgggggataaagggcgattatgcagtgattcttgcagtgctagacgagagaactgtgtgcattcgtaatgtactgtattgaccacagacactggtctgccggagattttcgagagaacgtagaaatgtgtgattgcgcgaaacaggtgtcctgttatgtagaattaataaatat

SEQ ID NO: 16836 - DNA, 385 bp, Zea mays
  Clone ID: LIB83-016-Q1-E1-F10
ggcggtagtgcatgccctcgggagtgggattacgccaggttcagggccatcgcagacaagtgcggggccatgttgctctgtgacatggctcatatcactggtctcgttgctgcgcaggaggctttgaatccttttgaattctctgatgtggttaccactacgacccacaaaagtcttcgagggccaaggtctggtatgattttctacaggaagggcccatagcctccaaaaaaaggccagcctgagggtgctctgtatgactacgaggacaagatcaactttgctgtgttcccgtcactccagggggggcctcacaatcaccaaattgctgctctagctgtagccttgaaacaggctatgtcacctggattcagcgcctatatcc

SEQ ID NO: 16837 - DNA, 361 bp, Zea mays
  Clone ID: LIB83-016-Q1-E1-F11
aagcagcacactcagctatccagcaaaagagatcgagaggcaggagtcatggccaccgtcagcgccgccgtggtgaccaccatcgttgcccgcgccgcgatcgccaggcccaatgctctagggctgcctgcgctgagggcgaggagcgagagggtgcggtgcagctacgccaaggacgcggccccagtcagcaccaagggcccaggcgcgtcgctgctcgccgcagcgggcgcggtgatcgcgtcggcggggcccgcgctggctctcgtggctgatcccatgtccacggggggcaccgggctgagcctcgggctcagcaacaaccttgctggggtggctcctcctgggcggtcttcgggct

SEQ ID NO: 16838 - DNA, 386 bp, Zea mays
  Clone ID: LIB83-016-Q1-E1-F12
gaatccgagggttcaagcgaccgacggcgaacatggcggcggacggcggcccagcgacgtcggcgctggaagaggccctcaagcccttccaggaaagagcctccgaggctgagatacgcatagcgaagctggaagccttgctgtacaacaaagatggtccgagcggtggatccgaggcaacttcctctgccgtgaaggatctccagtcgaagctagatgtggttactgcagaatgcttgactgaaaaggagaagaacaagaagctgaccatggagaacgagaagctccagtaccgcatgacccatctgatccgtgcgataaaagaggcggaatcgagataagaacagcccggcgaggccgatttcaaagcctgatgtccaagtgtt

SEQ ID NO: 16839 - DNA, 426 bp, Zea mays
  Clone ID: LIB83-016-Q1-E1-F2
caagatctccgaagatgctggctgagtcaatggcactaagaaaagatggtgggaacatcccctgctggacagtcatactcggaagaaatccgtccaggttgtgcgtgtgttgctgtgccaagagtactcttgcgagaagatgtaacagaaccgaaaactggcatcaagttccccactctacttaaagacaattccaatctgactacagaggtacactgcccccagttgacacatgcatctgatggttaaattggcaggtccttgttggaatgggtttcagaagcatgcgaataatgagggttaaagatctgaatctttatgcctttggattatatatacaacctgattctgtttgcaaaaagctgggtccaaagtatgcttgtattccagatgctgagttgaatgatcacccagatttctatgaag

SEQ ID NO: 16840 - DNA, 314 bp, Zea mays
  Clone ID: LIB83-016-Q1-E1-F3
caaactcatccgcccaaccagacccgcacgacacgacaccaagtcgaggagctcgagggcaccaatcatggacggtgtgcactccaacgtcgtcgggctcaagcccgccgcggcagtgccgcaagccgccgccgcatcatctctggcaaaaccggtgaatgtggtcacgttccgacaggtcgacgtaccgatcagtccagtctgacggccgtcgtacacgtcccgacatcacagattcagctaatggcacaattttcaagtccttactcgaaaggattacagacacatacgagcattgcgagattaagatgctg

SEQ ID NO: 16841 - DNA, 267 bp, Zea mays
  Clone ID: LIB83-016-Q1-E1-F4
caaactcgtccgcaacgactcatcgatcgagagcagcacacactgcacgcagctagctaggatcatcaacagcggcggccatggcggactccatgatctcctcgtcatctctggctgtggcgcctcacggcctgacgcccctctgccgccgcgcctcctccttcgacgtcgtccgctccaagaagatgatcactcagcgctagaccctacgggattgtgggtggacttaccgtctacatctactcgatcagtataaagggccatggc

SEQ ID NO: 16842 - DNA, 386 bp, Zea mays
  Clone ID: LIB83-016-Q1-E1-F6
cccacgcatccgaacgtggatgtgtcagttgttgacctcactgtcagaatcgagaagggggcctcttacgaggaaatcaagaaagctattaaggctgcttctgagggcccactcaagggtattatgggctacgtggaggaggatctggtttccaccgacttcaccggtgacagcacgtccagcatcttcgacgccaaggccgggattgccctgaacgaccacttcatcaagctcgtctcttggtacgacaacgactggggttacagcaaccgcgtcgtcgacctgatctgccacatgttcaggacccagtagagagagatatttctgcctccctatcgagggtcgtccccgatggcctttggttccaaaccatctttgctgcttgt

SEQ ID NO: 16843 - DNA, 374 bp, Zea mays
  Clone ID: LIB83-016-Q1-E1-F7
cagacgcgtgggctagaattagagtcttatgggcaaggacactattgctgatttactaacctctataagaaacgcagacatgaataaaaaaggaactgttcgagtagtatccacaaatattaccgaaaacattgttaaaatacttctacgacagggttttattgaaagtgttcggaaacatcacgaaagtaacagatatttcttggttttaactttgcgacatcataggagaaagactagaaagggaatatatacaactagaacctttttaaagcgtatcagccgacctggcttacgaatttatgccaactatcactgaattcctaaggttttgggcggaatgggaattgctattctttctatctctccaggta

SEQ ID NO: 16844 - DNA, 431 bp, Zea mays
  Clone ID: LIB83-016-Q1-E1-F8
gatggaaacaaagatattggacttcctgtactgctggtattgaacaagaaagatctcataaaacccggagaaatcgcaaagaaacttgagtggtaccaaaaatttactaatgttgatgatgttataccaataagtgctaaatttggtcatggagtggatgatatcaaggagtggatattgtcaaagctccctctgggtcctgcttactaccccaaggatatagctagcgaacaccctgagagattttttgttggtgaaatagtgagggaaaagatttttgttcagtacaggcaggaaattccttattcatgccaggttaatgttgtcagttacaaaagtcggcctgctgccaaggacttcattcaagttgagatacttgtggagaaagaatcacaaagaggcattatactaaggaaggatggcaaaagcat

SEQ ID NO: 16845 - DNA, 378 bp, Zea mays
  Clone ID: LIB83-016-Q1-E1-F9
acaccaccgagcccatggcggaccagctcaccgacgaccagatcgccgagttcaaggaggccttcagcctcttcgacaaggacggggatggttgcatcacgaccaaggagctgggcactgtcatgcgctcgctggggcaaaatcctacagaggctgagctccaggacatgatcaacgaggtcgatgctgatggcaacggcaccatcgatttcccagagtttctcaaccttatggctcgcaagatgaaggacaccgactctgaggaagagctcaaggaggccttccgtgtgtttgacaaggaccagaacggcttcatctcggccgccgagctccgccatgtcatgacaaatcttggtgagaagctaactgatgaggaag

SEQ ID NO: 16846 - DNA, 431 bp, Zea mays
  Clone ID: LIB83-016-Q1-E1-G1
aattgagatagacaccaaatatgtgccgatcaagcccattggtcgaggagcttatgggatagtttgttcatccattaatcgtgaaacaaatgagaaagtagcaataaagaagatacacaacgttttcgacaaccgtgtggatgcactacggaccttgcgggagctgaaactccttcgccatctccggcatgagaatgtcattgctttgaaggatataatgatgccaatacacaggagaagctttaaggatgtgtacttggtatacgaactcatggatactgatttgcaccagataatcaaatcacctcagggcctttccaatgaccactgccagtattttctttttcagttgctccgaggactcaaatatctccattcagcagaaatactccacagagacctaaagactggaaacctgctggtgaatgcaa

SEQ ID NO: 16847 - DNA, 403 bp, Zea mays
  Clone ID: LIB83-016-Q1-E1-G10
gtggtgcagctgcctgccttcagccttccctctctttcgcgacccccccggagccggagcagagatcgccagctctaccggcgcggaggcatggcgggggccggagacaaggtggactacgtcttcaaggtggtgctgatcggagactcggcggtgggcaagtcgcagatcctcgcccgcttcgcccgcaacgagttcagcctcgactccaaggccaccatcggcgtcgagttccagacccgcaccctcgtcatcgaccacaggagcgtcaaggcccagatctgggacaccgccggccaggagaggtacagagccgtgactagtgcttattatagaggcgcactgggagctttgctggtctacgacatcaccagacggcagagcttcgatcacataccccgct

SEQ ID NO: 16848 - DNA, 378 bp, Zea mays
  Clone ID: LIB83-016-Q1-E1-G11
aggacgcgtgggcgcggtctaagcttcgaatcggcgcatggaggcagcagtagccgcggcactcatgtcgcccaccgccgcacgtccctcgtggcggcccgcggccccgggcgccacctcgctcccctttgaccggaggcgcagctttgccttcggctccatcaacggtctcgggcgggaccagctcacctctaggactacgacgcgaagcagtgtggtcagggcctcctgttccccctcggagtctctgccaccgtcctcatcaatggcgccgctcaggtatggatcgcccgcggggcagctaggctcccagattcgtcacacgcatccgcacctagtgcatggcgccgcttaccagcagatcgaactgctccagag

SEQ ID NO: 16849 - DNA, 282 bp, Zea mays
  Clone ID: LIB83-016-Q1-E1-G12
aatcgatccaccgaggtttcttgtgcgtgccgccatggccatggcagtagctcaccttcttcctcagctctccgccgaaggcaatggagctatcaggaacagaatggccattctcttgattcttcagctttttctcttgacggttctttgttccataactgattcagcgctaggcgtggatggagcggcgtcgttcatcttcaccaacgcctgcaagtcacgcggtgtgggtgggcgcgctccacggtgccagctcgccgccgctcgcgcggtcgggcttct

SEQ ID NO: 16850 - DNA, 431 bp, Zea mays
  Clone ID: LIB83-016-Q1-E1-G3
gtggagagtcatcttggacacttcggttctatgagtccttctttgtggaatgtgtgccagtgattttgtcagatgaagttgagcttcctttccagaatgtgatcgactacagtgaaatctcgataaagtggccgtcgtccaggattggacctgaactccttgagtaccttgaatcaatatcagatgaaaggatcgaggaaatgattggtcatgggcgtgagatgagatgcttgtgggtgtatgcagctgatactgagccgtgctctgccatgagcggtatcctgacggagctgcagaagaaagtgcgtcggttccatcaatcggcggaaacattctggctgcacaacagaacaattgtgaatagagatctgattgagttccacagctggaggacgcctgttccgttgccatgaaccatgtattctgatttc

SEQ ID NO: 16851 - DNA, 400 bp, Zea mays
  Clone ID: LIB83-016-Q1-E1-G4
ggtcgagatcacgggtccacgcacgcgtccgcacttcaacgtcggttgcaagatagaaaaaggtcatccctctaacaccacgccgctgccgtttgctgcgcggcgcctctcctcacaacccgtacgccaacgtctccaatctcgtacactttcgtgctcatcatcatcgacggcttccccaagagcgtccgctgtggaggccctaacattccggcgggatgccatcccgcaagcgggagccaagcggcggtaggatgaggcgcgactcagcggacgcagtatccgtatgtgactggtaattcattcattgccttgaaatacaacgatggtgtgatcatggcatgtgacactggagcctcgtatggatcaaccttgagatacaacaatgtgtaacgcatta

SEQ ID NO: 16852 - DNA, 425 bp, Zea mays
  Clone ID: LIB83-016-Q1-E1-G5
cacagagagacctacccattggtatactaggaagccttatagcatgtgtgttgttatacgttgctgtatgcttggtcattactggaatggttccatatacattactcggtgaagatgctcctttggctgaggcttttgctgctaagggcctgaaatttattactgtattgattagtattggagctgttgctggacttacaacaacacttcttgttggcttgtatgttcagtcacgtttgtactttggacttggaagggatgggcttttaccttcagtatttgctgaagtacacccaacaaggcatactcctgtacagtctcagatttgggtcggttgtgttgcagcagtcatggcaggcctctttaatgtgcgtgtgctctcacatattctttccgtcggcactctgaccggttattcagttgta

SEQ ID NO: 16853 - DNA, 428 bp, Zea mays
  Clone ID: LIB83-016-Q1-E1-G6
cccacgcgtccggagccatcttggaaactgttcttttggaggccatgtatgaggttccagacgaaaaaacaggaaatgagcgagttgacgctgttgtggtggatgaggaggcgattggttccgttgataggccaggttgtggggctaaaattctccgaggggatggtgcattggaccagtacataacaagaaccaatgtgatgaatttacaggaaactaacgatggtttggccggggagctcgaggaagcgtacatgctgtctagaattgttagcttgtaatttgaaaggctggggaggaagcgtatatgctgagttctgaccaacttcgtacatcgtgtaacatgtctaccccaacacaggccggctactttttgctcacaaaatcacctgtactctgtctccattcctgttaagctctaacgagca

SEQ ID NO: 16854 - DNA, 431 bp, Zea mays
  Clone ID: LIB83-016-Q1-E1-G7
gacgtatcacacggatctcctggacattctgatataccgtctgttgctgctgttgttagttctcgtgaatggcctcttatctcgaaatacagagcatctgtccgcacccaatcaccaaaaatggaaatgattgactcgctgtttaagccacgggaaactgatgacgatggtctgattcgggaatgtctgattgacttctacaccagttcagggaagagaaagcctgaccaagtcatcatcttcagggacggtgttagtgaaagtcagtttaatcaggtgctgaacattgagttgcaacaaatcattgaggcttgcaaatttcttgatgagaaatggaatcccaagttcacattgattattgcccagaagaatcaccacactaaatttttcattcctggaaagccagataatgttccagccggcactgttgt

SEQ ID NO: 16855 - DNA, 404 bp, Zea mays
  Clone ID: LIB83-016-Q1-E1-G8
gttcggagctcagagccttgcgatctctcggctgcgcgcgcgcaagatggctgacccagaattggaagctatcaggaagagaaggatggaagaactaatggcaaaacacggtggcggtggggcaaatcaacaaaatgcaagccaacaaaaagctcaggaagacgcgaaacaggaagctgaggaacgccgacagatgatgcttgctcagatattatcttctgaagccagagaaaggatctcccgcatagccttggtcaaacctgacaaagcaagaggggtggaggatgttctgctgagagctgctcaaactggtggaatatctgaaaaggtgtccgaagaaagacttatctcccttctagagcaaattaacacccacacaagcaagcaaaccaaagttacgattc

SEQ ID NO: 16856 - DNA, 135 bp, Zea mays
  Clone ID: LIB83-016-Q1-E1-G9
accacgcgtccgatgaacactgtcctaccatgcagtcaacgctcatcgtcggggtatcagcttccgcgtaagacgacacccagtatcagctgggaaggtagtccgttgattgtgctagctgctagtgatgaccct

SEQ ID NO: 16857 - DNA, 167 bp, Zea mays
  Clone ID: LIB83-016-Q1-E1-H1
cagacgcgtgggggcagactaggaagcgcttttatggacttgtcgttgattgcgtgaacaaaggaacttgtaacactacctataaactggtcagactgagacggttagcatggatttttagtagtgttgctgtattttgttgtttcatacaagtactctattctgtt

SEQ ID NO: 16858 - DNA, 373 bp, Zea mays
  Clone ID: LIB83-016-Q1-E1-H10
gcagcacctgcaacgaacgacgacgacagctcctcctggagcatgcttcgtcacgcgccggcagaccagcaagcaatggtggggagctacagcttgcaccaccaggcaatggaggcgaaagctgtaggcggcgtcacctccccgagtttctccgctggtttgccgagctcgccggtggcggactacgtgggaaacgatgcttctggctaccatacaaacaactattaattaatgatggatgatgagccgctgccgaaaatatagtgatccaataggtggtgttaggctattcacacttactgtacagttttaaaacaatgtcacatcaaattttgtttatggaaccgtgtacactgagtttcaactagatgca

SEQ ID NO: 16859 - DNA, 406 bp, Zea mays
  Clone ID: LIB83-016-Q1-E1-H11
gtcacctaacaagcacaaccgtctgtacatggaagcgcgccccctggaggagggtcttgctgaggcaattgatgatggccgcattggcccacgtgatgatcctaaggtgcgctcccagatcctctctcaagagtttgggtgggacaaggatcttgccaagaagatttggtgcttcggacctgagaccaccggcccaaacatggttgttgatatgtgcaagggagtgcagtatctcaatgaaatcaaggattctgttgtggctggtttccagtgggcatcgaaggagggtgcactggctgaagagaacatgcgcgggatttgcttcgaggtctgtgatgtcgttcttcatgccgatgctatccacaggggtggtggccaggtcattccaactgccaagagggtcatt

SEQ ID NO: 16860 - DNA, 373 bp, Zea mays
  Clone ID: LIB83-016-Q1-E1-H12
atcttcgcagtgttccagggtctgctgaaagtgttggctgggattgataccaacttcacagttacctcaaaggcatctgatgaggatggtgactttgctgagctatatgtgttcaagtggaccagtttgctcattcctccgaccactgttcttgtcattaacctggtcggaatggtggcaggaatttcttatgccattaacagtggctaccaatcctggggtccgctctttggaaagctgttcttctcgatctgggtgatcctccatctctaccccttcctcaatggtctcatgggaaggcagaaccgcacaccaacaatcgtcattgtctggtccatccttcgtgcatccagctttctctttgctgtgggtg

SEQ ID NO: 16861 - DNA, 396 bp, Zea mays
  Clone ID: LIB83-016-Q1-E1-H2
caaattcgacatcgcaagcggccgtgggattttattaacatattatatataactcgaatttcttccattctcatttgacaatgcgactacaacgacgtatattgtgtttgggaaagtccgataaaaaaacgatttggaatctaccttttcatttgctttatcccttataaaaataactcaatcaaaatccaattatctactctacaagaatgaaatgcttgttatgcctaatatacttagtttaacctgtatctgttttaattctgttctttgtccgactagctttttcttcgccaaattacccgaagcttatgccattttcaacccaatcgtggatgttatgcctgtcagacctgtaaacttttttctattaacgtttgtttggcaagctgcagt

SEQ ID NO: 16862 - DNA, 425 bp, Zea mays
  Clone ID: LIB83-016-Q1-E1-H3
catgtggcgatccatccctcaccatgtcgtcggaaaaggaggcggcgctcgccgccgtgctcgatgacagcccaaccatatttgacaagatcatcaagaaggaaataccttctactgtggtttacgaggacgagaaggtactggctttcagggacatcaaccctcaagctccaacacacattctcatcatccccaaagtcaaggatggactaactggcctggcaaaggctgaagagaggcacatagagatacttggctatctcctctatgttgccaaggttgttgcgaagcaggaaggacttgaagatggctatcgcgttgtcatcaatgacggcccaagtggatgtcaatctgtttaccacatccacgttcatctcctcggaggcaggcaaatgaactggcccccaggctaagaatatcttgtg

SEQ ID NO: 16863 - DNA, 431 bp, Zea mays
  Clone ID: LIB83-016-Q1-E1-H6
caggacgcgtgggcggacgcgtgggcggacgcgtgggcggacgcgtgggccgccatctctgccaacgtcggctactgcaaggcaccaaccctgagctggaagggaagcggagtaccaggccggattgtggtctccatgtccaccacccgaagaggcctcgtctccctaagacgacgatcccctcggtttcgcgtctacgcggcgaaggcggagacggtgagcaaagtgatggacatcgtgaagcagcagctggcgctggcggcggacgtggggctgacggcggagaccaagttcacggacctcggcgccgactcgctggacacggtggagatcgtcatgacgctggaggaggagttcaagatcaccgtcgaggaggacaatgcccagagcatcgccaccatccaggacgccgccgacctcatccacaagct

SEQ ID NO: 16864 - DNA, 310 bp, Zea mays
  Clone ID: LIB83-016-Q1-E1-H8
cccacgcgtccggggaggcgtcagcgtctgcatatgctgatgtttatagcgcatttgcggagatcgatactattcatgttgtggaaaaacgtgacacacatgacaatgtccgggacgttcctaaggttaacccactggcacctttagcaacgattaatccagaagagcttcactccaaaattctccccatcttcgctgggcgacccgcaatcatggcatgtcaacgacatggctcatgtggcgagccagtttccggggacactgagcgccaccagctactcgatcacagagtagaacatacctgccctga

SEQ ID NO: 16865 - DNA, 358 bp, Zea mays
  Clone ID: LIB83-016-Q1-E1-H9
cggacgcgtgggcggacgcgtgggttttagtttgggctgccttattttctattgtatcactaaaggcaagcatccgtttggtgagtactatgaaagggatgtgaacattgcaaacaatcgctttgatctctttatggtggactacataccagaagcagtccatcttatatctcatttgttacaaccaaacccagaggcaagaccgacagcagtatatgtcatgcaccatccactcttttggagccctgaattgcgtctttcgtttctaagggataccagtgacagaattgagaaaaccagtgaaactgacctcatgaacacactggaaagcatacgatctttggcgtttggtggaaaa

SEQ ID NO: 16866 - DNA, 294 bp, Zea mays
  Clone ID: LIB83-001-H6-F1A
gtaggacgtatatttttacggcgatcatcattgaggcagttggacctgatccctaatcacttccgcgccactagtatcgatactgtgacgggtccgatcgagcctccaatggctcgagttctctcacctactatacctggtagttaacactgccgcacatctacaagcttaccaggacacgtacttatgggaataaacggtaaaaacgatcctccactcctgacttaaaaacgacgtcattcaggccggacgactacgtcatcagctctaaaccctaaatgtcaacaacatgtg

SEQ ID NO: 16867 - DNA, 466 bp, Zea mays
  Clone ID: LIB83-002-A11-F1A
gaatgtaggacaaaataatggacattggaatctagaatttacatatatatgtacaggttgtcatacacggagaggctacaagagctatatacagtctcggtatcttaaaaagttgatggcaggaacagcgacgcattggtcgcaggatctggccacgctcttcggcagggacgcccagattgacgggacgtgatcgccgttgcctgaccaaaccagcttcaacaacggagcaggcgggggatgcgctatctgccggtgccgtgaggaaagggatggcagcgccaaggtcttcacgaggcgacttcgcagacgtctccgcggcacagagggcacaccctgtgtatttctttcagccatttgtcaacacattgcaggtggaactcgtgcttgcaaggaagaattcgtatctggtctccatcctcatattcagttaggcagatatggcactgttccatatcatcactgc

SEQ ID NO: 16868 - DNA, 215 bp, Zea mays
  Clone ID: LIB83-001-H6-F2A
gacattactgttcagttgtttacttagcgagcggagacggtcaatttggctatgttatgtatggactgctatcagtgacacattggccaagcatggtcatgcgttacgctagtagttcggacactgaattcattaatgagtgactgtagcttaagttaatgcgtgattgagctatgtggaagctatgcgccggagagacctgtggtcaccaagtt

SEQ ID NO: 16869 - DNA, 122 bp, Zea mays
  Clone ID: LIB83-001-H6-R1A
gtcactacgataagttcgccgcacgtcactaccgtctccagatcagtacctggatatctatctaggtgagtctatcgttggggtcgtagagccttcgtccttctcgccacgcgtagcacctg

SEQ ID NO: 16870 - DNA, 390 bp, Zea mays
  Clone ID: LIB83-001-H6-R2A
ggcgctacaaagaggccgacgcacgagatcgacagtgatcaaaccaaacaactgtcatatatatcctaacggcgcctatgtgttgggaccggtaccccattcgttgctgtgggcacgcgtaccgcttgcgtggtgactgccgatggcactacgaaagaccaaccatgtgccctccgtgacgcggagacgcttctatagactcagcatggttgcctagccgctgccatatgctttatctcacagccccgtgtgagagcgcatctagacgagattgcgtgtacgcagcctcatcatgcagtcaatagtcagtctcctactgctatcgtggcagagtcacttcatagcatcgccagatcctgcagccaacacactgctgatcgtgccattagc

SEQ ID NO: 16871 - DNA, 399 bp, Zea mays
  Clone ID: LIB83-001-Q1-E1-B2
acaagcctctaaagtgagtcgtattaaaccggggcggacgcgtgggccctcatcatgtatctgatgtcttgacgacacatatggcacaacggatgaggtgtacgctgctgataagatctacacgcttccttgctgacccatgcaaacctgaggagcacaactgttcgtcctgctgggcgttttcctagtctaggtggcctaccctagatttgtgaatataatgtcttgaccctccaaattatgctcttgattgcctgggacaaatagcttagctgaagtcatgaactaacgtagagttattttttgtgtgctttgcgcatatctctgtccatcatgtagagcacatggtttactgcacatagtttaaagatttggacattttctgaaaaacagcgcgag

SEQ ID NO: 16872 - DNA, 436 bp, Zea mays
  Clone ID: LIB83-001-Q1-E1-E8
tcttgctcttctcctccggcctcctcggtcctcgctcacccgaaccagcaaccctaatccgtggccgcggacccgccgcaagctccatcgcgcgaatagattggggattcagtcgaggctacgcgggaactggtcgcgctcgagatcttagcctccgcacctgaaaccattggctccattgctattgctgtcgtggttcaggtgatgaaatcttggggagcccgcctcgctcggtcctaagatgctggcgagctacggaggtggtggccgcggcgtccatctctcctcccacaaggacatcctcctcggtcgcggcggccggagcttcctcttgggcaacacgtggtttctcctctccacctacccggcgcgcctcctgcacaccacgggacgccgcgcgcccgccgctttccttggcgcgatcaaccggccccct

SEQ ID NO: 16873 - DNA, 395 bp, Zea mays
  unsure (1)..(395): unsure at all n locations; Clone ID: LIB83-001-Q1-E1-F2
tagtttcactgttcatgaagtttgtcatcagggattaaatacatcatcactgatctgagaaacaaataatgaatggccacgtgtcagtggggggtgatcagcttatgcaaacctacaccaacagaagggggttgcacttcaccccccaacaatttctaactcctacaccgactaaattactagcccattgttaacggggaacattcactangcctatcagctgtcaggttgttaataaatacgtgagctgagctactacaacaaacaaggcccaccgacacaagcagctggagatttgccccgagctgcggccaataactcggaaaactagaagctgtcagtaatggttaaatttccttctgtgccggctgtaatccgatacgtatctgaatgtc

SEQ ID NO: 16874 - DNA, 354 bp, Zea mays
  Clone ID: LIB83-001-Q1-E1-F8.F1
accagaccaaagctcagtctagtttataggcagccggtagaaacacttgacgatgagttagccacagccacagccacagccatagccagccatctgatgagttcatgagtaaaactaaagtcatacagaggccactagttgacctttttcatctcagaaactaaaattcaaggtcgtcgtcgcgatcgtctctcacgtcacacatacaactagtatcatcgtcatcgtcatcatatactaaggcccaaaccaagaaccacgcagttagctcatcgtgcgtgtaccttagcaccattgccatatcaattagcagatgcatcaaatagctgtagtatcaaagggctccatttcctt

SEQ ID NO: 16875 - DNA, 539 bp, Zea mays
  unsure (1)..(539): unsure at all n locations; Clone ID: LIB83-001-Q1-E1-F8.F2
aaaaatgattaccaggccaaagctcagtctaaattataagcagccgggagaaacaattgtcgatgaggtaggctcatacacagccacagacctagccagccatggtgggagttcatgagtcaaactaaagtaatacagagggcccttgttgacctttttcctctcaaaaactaaaattcaagggcggcggggcgagcggttattacgtcacacatacaactagcttcatcttgatggtggttatatactaagggcgaaaccaagaaccacgcaggcaggtcatcgtgcgtgtgccttaccaccactgccaaatcaattagcacatgcatcaaataggtgaagaatcaaagcgctacatttacttggactcatcataaggcgcagagcaaatcagagcaggaggacgtacgcctctgggccgtgaccaactgttgctgtcacgggaggttgaggaagatgcatgcggngtccaggtgggccaactctgcggcggcccagcacgcgcccatgtcgaacgacacggagtgccacacgaacca

SEQ ID NO: 16876 - DNA, 175 bp, Zea mays
  Clone ID: LIB83-001-Q1-E1-F8.R1
gcgtcgtggcgccggccccggagctcgccaccgggccgacccaggcaagacggcgaccaccaccacgacgacgagcgagattaccacggagactggcgcgctggaggactccgactccctggcgcaccttctgttgcatcccgtggacaaaggacgcggaggccgtcgcgctcgg

SEQ ID NO: 16877 - DNA, 608 bp, Zea mays
  Clone ID: LIB83-001-Q1-E1-F8.R2
cgcgtcgtggcgccggccccggagctcgccaccgcggccgacccatgcaagacggcgaccaccaccacgacgacgagcgagatcaccacggagactggcgcgctggaggactccgactccctggcgcacctgctgctgcagcccgggacagaggacgcggaggccgtcgcgctcggcctcggcctctccgacttcccctccgccgggaaggcggtgctggacgacgaggactcgttcgtgtggcccgccgcgtcgttcgacatgggcgcgtgctgggccggcgcagggttcgccgacccggaccccgcctgcatcttcctcaacctcccgtgacagccacacacggtcacggcgccgaggcgtacgtcctcctgctctgctctgctctgcgcctgatgatgagtgcaaggaaatggagcgctttgattcttcagctatttgatgcatctgctaattgatttggcagtggtggtaaggtacacgcacgatgagctgactgcgtggttcttggtttgggccttagtatatgatgacgatgacgatgatactagttgtatgtgtgacgtgagagacgatcgcgacgacgaccttgaattttagtttctgag

SEQ ID NO: 16878 - DNA, 222 bp, Zea mays
  Clone ID: LIB83-001-Q1-E1-G1
gtggttcgtcacaacactctagagtgagtcgtaataatggacgcctcaagctataggtcctttttctgctgcctctctccctgctcttcatctgtatcattctctggttcttgaatgcttgagtgaatggtgaataccgcatacctgtatttcaggaatcatatttgattaaatggtgaatgcactgcataccggattcaaggaaaaaccaaaaacacaaaa

SEQ ID NO: 16879 - DNA, 281 bp, Zea mays
  Clone ID: LIB83-001-Q1-E1-H4
gctctcttgccggccgtggcctgccatcagctcgcggcgcccacgcctcccagcaaggtgggtggcctcgccggacggcggacgacccccccggtgccggtgccagtgccactgccaccacctcggcccgccggacagcgggcgcggaagaagatgaggctcccggagatccagcagatggtgcggtcgctgtcggtggagaacgacgccctccgcaaggagatgagagcgttgcggagggattgcacggcgctgttccaagagaacggcaagctagagac

SEQ ID NO: 16880 - DNA, 372 bp, Zea mays
  Clone ID: LIB83-002-A11-F2A
ggaatgtaggacaaaataatggacattggaatctagaatttacatatatatgtacaggttgtcatacacggagaggctacaagagctatatacagtctcggtatcttaaaaagttgatggcaggaacagcgacgcattggtcgcaggatctggccacgctcttcggcagggacgcccagattgacgggacgtgatcgccgttgcctgaccaaaccagctttaacaacgtagcaggctgttgatgcgctatctgccgttgccgtgaggaaagggatggcagcgtcaaggtcttcacgtggcgactttgcagacgtgtcctaggcacatagggcacactcctgtgtatttctttcagccatttgttaacacatt

SEQ ID NO: 16881 - DNA, 496 bp, Zea mays
  unsure (1)..(496): unsure at all n locations; Clone ID: LIB83-002-A11-R1A
agagctacaaaaagctagaggcaccccaacgcatgnntgatatggaacagtgccatatctgcctaactgaatatgaggatggagaccagatacgaattcttccttgcaagcacgagttccacctgcaatgtgttgacaaatggctgaaagaaatacacagggtgtgccctctgtgccgcggagacgtctgcgaagtcgcctcgtgaagaccttggcgctgccatccctttcctcacggcaccggcagatagcgcatcccccgcctgctccgttgttgaagctggtttggtcaggcaacggcgatcacgtcccgtcaatctgggcgtccctgccgaagagcgtggccagatcctgcgaccaatgcgtcgctgttcctgccatcaactttttaagataccgagactgtatatagctcttgtagcctctccgtgtatgacaacctgtacatatatatgtaaattctagattccaatgtccattattttgtcctacattc

SEQ ID NO: 16882 - DNA, 452 bp, Zea mays
  Clone ID: LIB83-002-A11-R2A
agagctacaaaaagctagaggcaccccaacgcagtgatgatatggaacagtgccatatctgcctaactgaatatgaggatggagaccagatacgaattcttccttgcaagcacgagttccacctgcaatgtgttgacaaatggctgaaagaaatacacagggtgtgccctctgtgccgcggagacgtctgcgaagtcgcctcgtgaagaccttggcgctgccatccctttcctcacggcaccggcagatagcgcatcccccgcctgctccgttgttgaagctggtttggtcaggcaacggcgatcacgtcccgtcaatctgggcgtccctgccgaagagcgtggccagatcctgcgaccaatgcgtcgctgttcctgccatcaactttttaagataccgagactgtatatagctcttgtagcctctccgtgtatgacaacctgtacatatat

SEQ ID NO: 16883 - DNA, 270 bp, Zea mays
  Clone ID: LIB83-002-Q1-E1-F4
gcaagactctaaagtgagtcttattaaactctatcaacgcggatggtactctgttgtttatagtccctgctgctaaccacccttgttgctggtgctgctggagaggcattgtacctgtccatgcatatatgatatatatgttgtaacgttgtgaaagcaaacaatcttgggtaccaatgtttgttaaaaaaaaaaaaagaatcaacaagactaaaataaagacaactaaataaaaacagaataaccacgaagcagatacacatcataaaa

SEQ ID NO: 16884 - DNA, 537 bp, Zea mays
  Clone ID: LIB83-002-Q1-E1-F9.F2
tcccgtttttgttttttgaacagagggaatgacagttgtgagctttattgcaaataggatctcttatatacaatggatgcagtgtctcccaaggggtgtgtcctttgggagaaaactgtcagataggggttgatcactttgtacacaatattgggggggcggaatccaaccatggcttgcatgcatgtgtagtagttgtatatgatataattaatacaccttttcttgccccccaatctttgtaaatcgaaaatgcattaattaaccatttgtatttttaagacttatttccagcttattaatttattagaataatttgatgaagttagaatgtgagcgctatagctgcctagattatccgatatctgataatgccatgttgagctccttgaccttggcaccgacgaccctgcgctgctcctccccctccttgatcatgatgaacttttgcagagccttcactctgaacttctttactacatttttaaacttattaaaggtccatctggcaaattaccggctcatcctttttagcga

SEQ ID NO: 16885 - DNA, 414 bp, Zea mays
  Clone ID: LIB83-003-Q1-E1-D12
acgactgcgtccatgagctatacgccgacggccaaccgacaggaggctcgtcgtcagcgtggcaggacctgctggtcatgtcgccgtccaaggggtcggggcagcgggagctcaaagctgccatcgagaagaacgaagggggcttcgtcaaaccgggataaccgtgtaactgctacgttcgttcgttagttcggttccaacttccaaaggaatcgttccctagccggattgttgatcagctggaacgatttctgaatagattccttcgtaaccgaacatgcccctaacaggcgcatcatccagaaaccgggaaagatgaagctaatgtgatgctttgattgtggaggtggcctatcttcttcctgttgtttccaaacatacgaatttcgcaatgcattttgtatgatgcgattc

SEQ ID NO: 16886 - DNA, 405 bp, Zea mays
  Clone ID: LIB83-003-Q1-E1-D5
accacgcgccggcagatcccaagctcaccctagagggggaagagggcgaccgaaggcggcgatgggtttcatcatggacttcgcggagaatctgatcctccgtctgatggaggacccggacaagcgcgaccaggttcggcgggagcatgtctacaagatgaaggagcggtgcgagcgcactaaggcggcgtggagcctccctctgcgcccctacggcttctggaccttcgaccgcttcaactcgcagctctcctgggatccccagatcagccaggccgccggccgtcgggacccctacgacgacctcatcgcacgccactctggctcgccgccgtcctcctgaacaccgttccgatctttggccagaaaggctacttgggcatcaataagaaactctttcccctc

SEQ ID NO: 16887 - DNA, 428 bp, Zea mays
  Clone ID: LIB83-003-Q1-E1-G11
aagcaacccaaccaaacccgcacgacacgacaccaagtcgaggagctcgagggcaccaatcatggccggcgtgaactccagcgtcgtcgggctcaagcccgccgcggcagtgccgcaggccgccgccgcctcatcgccggcgaagcgggtgcagctggccgcgcccgagggccgccgcgccgctctgctcggcctggcggccgtcttcgccgtcacggccaccaccgggtcggccaaggccacgatcttcgatgagtacctcgagaagagcaaggccaacaaggagctgaacgacaagaagaggctggccaccagtggcgccaactttgcgcgcgcctacaccgtggagttcggcagctgccagttcccctacaacttcactgggtgccaggacctcgccaagcagaagaaagtccccttcatcagcg

SEQ ID NO: 16888 - DNA, 54 bp, Zea mays
  Clone ID: LIB83-003-Q1-E1-H9
aaaaaaaaaaaaaaaaaaaaaaaaaaaaaaaaaaaaaaaaaaaaaaaaaaaaaa

SEQ ID NO: 16889 - DNA, 412 bp, Zea mays
  Clone ID: LIB83-004-Q1-E1-E9
tgcttttaacattctctgtaggttatgtattggagaagagtcgcggacagaattcagatgctgaagtcagcaattttacatcccgagctgaattccagagcataacctactggaatcacgatacagcgccatcagcagaggattccctcccgaggtgcttccattggcttaccgtcgctaatgcgatgcatagagcagtgactgctgaagacctgactaacatggcagcaatgcagaatcaggacaagtagattcgttctataacgaagccatgcaatttcgatttggtgaaccatctcgacaaaggatcttgtaacaaccaacatgttatttgaacgcatccagtaggtaatgtttaggctttggggtaagatgcttcaggagatccttgttcagtagcatctgaaaatgt

SEQ ID NO: 16890 - DNA, 385 bp, Zea mays
  Clone ID: LIB83-004-Q1-E1-F9
actctcagaaagtatgtctgctgataaacgtgaggtccaatctctttctgcaaaatatgatgagagatgcaagaaggttggagatgtggcatcaaagctaacaatggatgaggctactttccgtgagatccaggagaagaagttggaaatttataacgccatagttaagctgcaaaaaggggatgatagcgatgagaagtttcaggagcgggctaataagatacagtcagatcttgaggagcttgtgaaatcattgaatgagcaatgcaagagatatgggttgagagctaagccaactactttagtggagcttccttttggttggcaacctggaattcaagagacagcttatgcatgggatgaagaatgggataattttggagat

SEQ ID NO: 16891 - DNA, 599 bp, Zea mays
  Clone ID: LIB83-004-Q1-E2-A4.F2
acaaatacagcgctagctttgttcgttcatatatgcgctttgcagcctttcttcactctgaaagcccggccgggattattgctacgtatacgtacagcaatataataattagctaaacaatacgagcggaacaacgggagaatatacattaaggtaacagctccttcccgaacagcccagcaatcgctcggccagggtcttcctgcgtcagcagggactctcctaccaaaaccgcgaaaacaccagctttttgcacatatgccacgtcatcgggagtgaacagcccagactcgctcacaacctgtattcgcttctcgttaatgatgtcgccacgcttctctaacaacatgtttgtgtttgcagtgtcgacttcgaatgtcccaagactgcggttgttgatgccgatgagctccacaccgtctatcttgaggacgcgatccaactccctctcatcatgaacctcgacaagagctgccatcccaaggctcttgcagacgcggaggaagtaggtgatgtcgatgtccggcagcacggccgcgatcaggaggaccgcgtccgcgcctttcgagcgcgcgtagtagatctgccaggcgtcgatg

SEQ ID NO: 16892 - DNA, 89 bp, Zea mays
  Clone ID: LIB83-004-Q1-E2-A4.R1
cccacgcgtccggcgccgtcccgcgcaacatcctggagcagatcatctcgggacaaggaggtggaggtggcccagcgcaaggccagaga

SEQ ID NO: 16893 - DNA, 668 bp, Zea mays
  unsure (1)..(668): unsure at all n locations; Clone ID: LIB83-004-Q1-E2-A4.R2
cccacgcgtccggcgccgtcccgcgcaacatcctggagcagatcatctgggacaaggaggtggaggtggcccagcgcaaggccaggacgccgctgtgcgaggtgaaggcgtccgccgcgctcgcgccgccgcccagggacttcgtcggcgcgctgcgcgccgcgtgccgccgcaacgccgtccccgcgctcgtcgccgaggtcaagaaggcgtcgcccagcaagggcctcctcagggaccacttcgacccggtggagattgctcgcacctacgagaagaacggcgcggcgtgcctgagcatcctgaccgacgagaagcacttccaggggagctttgagaacctagaggccgtacgcagctccggtataaactgccctctgctctgcaaggagttcgtcatcgacgcctggcagatctactacgcgcgctcgaaaggcgcggacgcggtcctcctgatcgcggccgtgctgccggacatcgacatcacctacttcctccgcgtctgcaagagccttgggatggcagctcttgtcgaggttcatgatgagagggagttggatcgcgtcctcaagatagacggtgtggagctcatcggcatcaacaaccgcagtcttgggacattcgaagtcgacactgcanacacaaacatgttgttagagaagcgtggc

SEQ ID NO: 16894 - DNA, 371 bp, Zea mays
  Clone ID: LIB83-004-Q1-E2-C8
aaaccatagtattcaaaaccatagtattcaaaactttgctaccaaacacactctaaaatgtttacagattacagtcacggctaaatcatagggaacactaggattagccatagtgccccttcggccttcccaacgccagttccccccttgaaatccacaggaatttaccgtacggcgagcatttcaaaggtcatttgtcccgagtttgaatggtttcttagatcaaccaaggtctgttattacatttaccccctgagattaataatctaatcactgtctacttaatcctcgtcgtcgtcttcttcgtattattcctcttcaacctcctcctcctcctccaccacctcatctgactccaacgacggtggaga

SEQ ID NO: 16895 - DNA, 145 bp, Zea mays
  Clone ID: LIB83-004-Q1-E2-D7
tttcgcgtttcacggcggcgcggatatagagccatcggcggcacactgaccgctggctaacggtacagagatgaccacggttatcctcagcgcctctcggccttccattgtcagcttcctcatgccgatgggggataacctcgtg

SEQ ID NO: 16896 - DNA, 423 bp, Zea mays
  Clone ID: LIB83-004-Q1-E2-E9
tgcttttaacattctctgtaggttatgtattggagaagagtcgcggacagaattcagatgctgaagtcagcaattttacatcccgagctgaattccagagcataacctactggaatcacgatacagcgccatcagcagaggattccctcccgaggtgcttccattggcttaccgtcgctaatgcgatgcataaagcagtgactgctgaagacctgactaacatggcagcaatgcagaatcaggacaagtagattcgttctataacgaagccatgcaatttcgatttggtgaaccatctcgacaaaggatcttgtaacaaccaacatgttatttgaacgcatccagtaggtaatgtttaggctttggggtaagatgcttcaggagatccttgttcagtagcatctgaaaatgtctgggtaattt

SEQ ID NO: 16897 - DNA, 345 bp, Zea mays
  Clone ID: LIB83-004-Q1-E2-F3
tacttcttcccccaaccaaagacacgaatcagccatggcgctcgcctccgccacgtcccgccccctcctcggtcgccccgccggcaccgcgcggccccacctcgccgtttcctcatcctcgcccgcctcctcgatccgcttcccccgcggcgccgacggcggcgccagcagagcgggcgtctctctccgcgcccccacgcctccagtctgtgaccccaaaagccttcttttcatgtctggaatggagctggactacagcgacgccctcattggtggcggcttcttgttccagaatcgaaacgcaacaaaaacctgtgggtgcggcaaatctttcgcgactggaaa

SEQ ID NO: 16898 - DNA, 433 bp, Zea mays
  Clone ID: LIB83-004-Q1-E2-F7
tctaaccacctgcgctgcgctcgcgtctctcgtccccctcagatccaccgactcgctctgagtctctgaccgccccttccgtcgtccccgttcgaaggcgcggcaagcgagcgattcagccagattcgattcgacatgaatcccgagtacgactaccttttcaaacttctgcttattggtgattctggtgttgggaaatcatgcttgcttctcagatttgcggatgattcatatttggacagctacatcagcacaattggggttgattttaaaattcggacagtagagcaagatgggaagaccataaaacttcaaatttgggatactgctgggcaagagcgcttcaggaccatcactagcagctactaccgtggagctcatggaatcattgtaagttggccacctgaactagcaacttttgaaacttgtcaac

SEQ ID NO: 16899 - DNA, 410 bp, Zea mays
  Clone ID: LIB83-004-Q1-E2-G8
catcaattcgtactgctcatgcaattcctggaggccctaggaattggttctgcagttgtacctgtaggctgtagctgccaatttagttcgattttgaatttggcaggtagttgttgtgcttgtttctagatgcaagagtgcttattgtttgtggtgtttgttattggaaattttggttggtggtagttatttgtccggaaaggttaatgcaatgctgtggcttgtcttgcttttagtcaatggtagtaagttgagtaaaatgttcatgtgtatgtgcagcttgtggtcggcagtgtgaaattttgacctctaattatttgttagtaatgtaattttctcaaaaaataataaaaaaagaaaaacaacaacagtaataaatagaaaaacgtgccacacaggatgggtaaaaa

SEQ ID NO: 16900 - DNA, 386 bp, Zea mays
  unsure (1)..(386): unsure at all n locations; Clone ID: LIB83-005-Q1-E1-A5
accacgcgtccgcaccgatagttaccatgtttgaaagaactgaagctgtaaatcacagtcgtcgttgcttgtgtgtgtgtgtttatagttcctccatggtttaccatcactttcagcttttctagtatatctagtgcttgctatgtttcataatttcgggctatgttgtttcagtgtacggtatttttgtttgtttccttccacgattatataatctagcttatggattatataagcaactattgacctgcttatggattaccataatctaggtgtctaggttatataatctatctaataatctgttttgtttgtttgcctctcaacttatttaagttggattactgtttgtttcctttcaaaattatacaatccaacttatanaa

SEQ ID NO: 16901 - DNA, 398 bp, Zea mays
  Clone ID: LIB83-005-Q1-E1-B6
tgaagcgcgcgagagaaacgcgtatacccaggcggcggttgaggaagaggaggagaagaagaagaagatggcttcctccgcatacgcctcatggtccaagcggtggatccgtcccgaggtgtacccgctgttcgtgccgatggccgtggccttgggcatctgctcgtaccagcttgtgcgcaacatcacgggcaaccccgaggtgcgggtgaccaaggagaagagggcggccggcgtcctggacaaccacgacgagggcgagaggtacgctatgcacggcctcaggaagttcgtccgcgggaagaagcccgagatcatggcctccatcaactccttcttcgccgaccctcccaaggacgattaagctagattccgtcatggatggatggatggatgga

SEQ ID NO: 16902 - DNA, 385 bp, Zea mays
  Clone ID: LIB83-005-Q1-E1-E5
ttttaatcgacaacatttgaataatatgtacataacattaaaaagcgtatacagctggtgataacgttgctacatccaaatagcgtgtagcatgcctagcaagccaaacatattaccttacagcaagcatcccattgccgcttcacacatctttgctgccttcgatcggacgcgtgggcaatcattgtttttggcaacaaaattagcacacaaactggaattggcacgtccattgccatagctggtgttgctatgtactcttacattaaggctaagattgaagaggagaaaaggaaaaagagcgcatgactgctgtgaataatattatcgagaccttcctcggacacaacatcgtcgacaatcacgacctacttctatatcttgt

SEQ ID NO: 16903 - DNA, 296 bp, Zea mays
  Clone ID: LIB83-005-Q1-E1-E6
aaactagtggtctgcaagtagttgttcagaatagtctgaaacatgagatatcactttttcagctctgtccggtcctcttatgtttggtcttttctgatgcctccgaaaattctgtgtatgttgagttggtacatagcggacaaaagggagactatgaaacctctgtctagttttgtctctgtaaattgtacatgtgcggtgtttgtatcagttgtctgaaacatttctgcagtttactggtaataacagaaattgaatctcagcatctaaaaaataataaaaaagataatgaaata

SEQ ID NO: 16904 - DNA, 392 bp, Zea mays
  unsure (1)..(392): unsure at all n locations; Clone ID: LIB83-005-Q1-E1-H8
tggctatcccggcgccgtgcgcccttacgtgcggccggctgatgaacctgagcgagaggctcgtgctggttggcggcatcggcaagcaagataggcctggggtcatcaagggaatcggcatctgggagctccgtcgcaaggagtggcacgaggtcgcccggatgccccacaggtacttccaagggttcggcgagttcgacgacgttttcgcaagctgcggggcgcgtgatcttatctacatccagagctatgggtcgccggcgctcctcaccttcgagatgaaccacaggtcgtggaggtggtccgcgaagagccctgtttccaagaggttcncgctgcagctgttcactgggttctctttcgagccccagctggacattgctctctagttt

SEQ ID NO: 16905 - DNA, 377 bp, Zea mays
  Clone ID: LIB83-006-Q1-E1-B1
tgctgactcaaaagcacttcgtcaaaaggatggagagcttgcttcttacatgtctcgcttggcctcattggaatctattcggaattcactggcagaggagttggtgaaactgacagaacaatgtgaaaagttacggactgaagccgctgctgtgcctggcttaagggctgaattggaagctctgaaacaaaggcacttccaagctctagagttaatgggggaacgtgatgaagagttggaggagctaagaaatgatattgttgacctaaaagagatgtacagggagcaagtggatcttcttgttagccagctccaggcattgggtgctcgtgtatagtgccggtatggatttgtcgtgccatcgggcaaggcaagac

SEQ ID NO: 16906 - DNA, 328 bp, Zea mays
  Clone ID: LIB83-006-Q1-E1-B4
atccctgcgagtttcagtgcaaggcagcatccaatttttttgcaatatcgtcatgtctattagctcccagtcccagtgctgaaaagcgaaatgtaaactagcattgtctgattgcatgcctcagtttttttttccccttggccccaagtgtatgaactaatggtacacctacttgttcagctgctctaggcctgattctatttggagcttgttgtggcagagatttcatctcagtttacaaaggctagtgatgctagaaggtgttcctgccaaaaaaaaagaagaaaaaaaaaacaaaaatgtaaaaaggaaaaacaatgtcaagaaa

SEQ ID NO: 16907 - DNA, 411 bp, Zea mays
  unsure (1)..(411): unsure at all n locations; Clone ID: LIB83-006-Q1-E1-C8
cggacgcgtgggcaagaagctcttcctctgggtctacgtcacggggatggtcgcgcaccccgaccagggcaccatcgagttccaggccggcttcgtctcggagtcgctatcagcctccatgtttgacgaggtgcgcacctgcggttccagcgctggcgcgcagctgcgcggcgcggctggggtcatcggagagcttgggctgctccccgttgcgcaggcatgaacctcgagtttgagaatccacgctaccggagaaacgcaggagcttcctgtctgctgtcgcctcgagccctagagtgcaggacgttcagctgtggggtgtgttccagtatctggttgttgcttcccggtctcaatggacatggatgctctgtanaaatgtatatcccatatgctgttgctgaaactgcg

SEQ ID NO: 16908 - DNA, 431 bp, Zea mays
  Clone ID: LIB83-006-Q1-E1-G3
gaagcttggagcctcgtgtctctgattttggccttgcaaggctgcttgtagacaatgccgccgcccatgttaccactgttgtggcgggcacctttggatacctagcaccagagtacttgcaaaatgggcatgctactgagaaatcagatgtgtatagctttggagtgcttttgctggagctagtgacgggaaagaggccaaccgattcatgcttcatcaagaagggactgagcattgttggctggctgaacaccctgacgggggagcaccggctggaggatatcgtcgacgagcgatgcggcgacgtcgaggtggaagccgtggaagccatcctggacatcgcagcgatgtgcaccgacgcagacccggcgcagcggccgtccatgagcgctgtcctcaagatgctggaggaagagatcctgtccccctgc

SEQ ID NO: 16909 - DNA, 420 bp, Zea mays
  Clone ID: LIB83-006-Q1-E1-G9
cccacgcgtccgcccacgcgtccgcccacgcgtccgtacgtagtagaggcaagcaaaagggcagggatagagcgccgccgagatatctagctagaagagcctagaagccggtgtagaggatcaggaggatgtctgggtcgtccggctccggcgtgtgggtgttcaagaacggcgtgatgcagctggagcagccggccgcggcggcgagccggaaggcgctggtgtacgtgccgacgaacgaggtggtgcggtcggtggaggcgctggagcggcggctgggcacgctgggctgggagcgctactacgagaaccgcagcatcgtgcagctccacaagcgcgacggcggcgccgacctcatcaccatcccgcgcgacttcgcaagcctccgctccacccacatgtacgacgtcgtcgtcaaga

SEQ ID NO: 16910 - DNA, 406 bp, Zea mays
  Clone ID: LIB83-006-Q1-E1-H12
tatgaatcatccaggagctcgagggcaccaatcatggccggcgtgaactccagcgtcgtcgggctcaagcccgccgcggcagtgccgcaggccgccgccgcctcatcgccggcgaagcgggtgcagctggccgcgcccgaaggccgccgcgccgctctgctcggcctggcggccgtcttcgccgtcacggccaccatcgggtcggccaaggccacgatcttcgatgagtacctcgagaagagcaaggccaacaaggagctgaacgacaagaagaggctggccaccagtggcgccaactttgcgcgcgcctacaccgtggagttcggcagctgccagttcccctacaacttcactgggttgcaggacctcgccaagcagaagaaagtcccttcatcagcgaacgact

SEQ ID NO: 16911 - DNA, 434 bp, Zea mays
  Clone ID: LIB83-006-Q1-E1-H2
tcccgctcggctcggccaacgcgatctgttccccaacctccgcagccgctccaccgccctccactccggctgccgaatcgacccgccccgatccagatcaggagctgagggatggacgcgaacaggcgccagagtgggatccagcagttgctggctgcggagcaggaggctcagcaaattgtgaatgccgctagagctgccaagtcagcgaggctcaggcaagcaaaagaggaggctgagcgggaaatagccgaataccgtgcccagatggaggctgaatttcagaggaaggttgcagagagcagcggcgactctggtgcaaacgtcaagcgtctggaggaagaaacggcggcgaagatcgagcaactcacccagcaggccgcaagcatctccccagatgtcattcagatgcttctgcggcatgtcaccaccgt

SEQ ID NO: 16912 - DNA, 411 bp, Zea mays
  Clone ID: LIB83-007-Q1-E1-A5-F2A
aaatacggattaaaccgggcctagtcatcatatactctaatgaccagaactgctgtcaccagacaacccagaaacattctctttgtcccaaaataaatcaatttctcagagttatcttaaatcaaactatttttaagtttgaccaaattcataaaaagagcatggcactgaattagtgtcactaatgcaccataaaatatttttcataatgtactcatttgggggcatagagacatagacgatggtgcctttcctataaaattggtcaaacttaagataatttgactttaagtgattctagaaattgacttattttgagacggagcatattactataagaaagaaaagcataagcagtataactacttcacggttcagcttcaacgatcatggactcgggatttggatctc

SEQ ID NO: 16913 - DNA, 413 bp, Zea mays
  unsure (1)..(413): unsure at all n locations; Clone ID: LIB83-007-Q1-E1-A5-R2A
caccatcgcagaagcgcagtaggaagccggacaaagctacgcaaggagggagaaagcgtgtaaaccatggcgtcctccgcgttcctcaacgctctcgtcctccgatcgccatcaccgtcgctctcgtcctcgtctaaccgccgcagcaccggcgccttcgcgttcccgaacccaccgcgcttcccatgcctgcgttctgcgcgtcgactcgtccttgcgagggcggcggcagcgccggcgccgggcgatggccccgaggacgagtgggggccggagcccgagggcggttccgctgtcacgggggccgcggtggcggaggcgccggaggcgaaagaggtcgcggagctcaaggcgcagctaaaggacgcgctgtacggcacggagcggggcctgcgggcgtncagcgagtcacg

SEQ ID NO: 16914 - DNA, 367 bp, Zea mays
  Clone ID: LIB83-007-Q1-E1-E10
agattgtttgtacaagagagctagctattggcatgcaccattctcctgtatggggactgttgtatacttgcatatgaatacacaagaatgtaatgccacattcaactttctgctctttgtttgcgttatctgtgccttcgtcttggatggctttcactcccatagtcccatgtgatgcacaacaatgtaccgagtttgactgattcatgagttcattgtacttgaatttccagattatgctgcgtttgaagcagacagaaggagcatttttttttcactgcgagtttcctatattccatctcttctgctcttgataagcagacacttggtatttgtaatgcaattttttccagtgttgcttgggact

SEQ ID NO: 16915 - DNA, 378 bp, Zea mays
  Clone ID: LIB83-007-Q1-E1-E2
ttttgccatggctggtgcatcgctcctctccccatcctgcacgctcctccgcctgattcccagcgcgtcgcacatctgctgctcgtcgcacttcaagagattcgatcgggttcgccggttcgcgcccgccgccatggcgacttcctcaggaccaaaggaggcgccagcgaataaccctgggctccagaccgaggtcgaccccgccaccaaaggctacttcttgcaacaaacgatgttacgtgtgaaggacccaaaagtgagccttgacttctactcacgtgtgatgggcatgtcgttgctgaaaaggttggattttgaagagatgaaattcagtttgtattttctaggttacgaggatgtgaccttagcccctgatga

SEQ ID NO: 16916 - DNA, 332 bp, Zea mays
  Clone ID: LIB83-007-Q1-E1-F8
cggacgcgtgggcggacgcgtgggtgatctcatgccaagagcgattgcattgcatggaggtggtgatcctattgtgctgatttgcctcgctcgtgtcaccaacttcaatgttggttcctttatctggtggtgttatttatgtttgattggtgaccctgagcgtattttggctgttagagcagcgttaaattcaacgtagcaacgatgggtggaatctgcgatagtttggtcttgtgtagagtttgaattaaaagttgttacttggctgattgttccaaaaaataattgacaaacgccatggtcttcaaaaaaaaaaaaaaaaaaaataaaaa

SEQ ID NO: 16917 - DNA, 232 bp, Zea mays
  Clone ID: LIB83-007-Q1-E1-H12
tatgaatcaggcaaggcaatccccaaccagcagatcattagcaagctcgagagggccctgggaaccaagttgcgtggcaagaaataactttcccaacaatttgtgtccccggagcaatcataatagggggaagacaaggcaagctgtctgcttatttgtctatgtttggtatctcaagtcctgcggactgtttctgttggcacaagaaggaataaatgtgttcaaggacctg

SEQ ID NO: 16918 - DNA, 392 bp, Zea mays
  Clone ID: LIB83-008-Q1-E1-A1
tttttccacaggggagccagggctgtagccggacgtgcgagtcgtcgttctgcatagtcccgccgctgctgaggtacggcaagtactgcgggatcctgtacagcggctgcccaggcgagaagccctgcgacgcgctggacgcctgctgcatggtccacgaccactgcgtcgacacccacaacaatgactacctcaacacgcggtgcaacgagaacctgctgagctgcctcgacggggtgagcccggcggggccgacgttcccggggaacgagtgcgacgtcggccagacggcgtccgtcatacgtggggtcatcgagtcggcggtgctcgcgggcaagatccttcacaagcgcgacgacggccagtagccggcgtcctgggctcctcctggc

SEQ ID NO: 16919 - DNA, 380 bp, Zea mays
  Clone ID: LIB83-008-Q1-E1-A3
aaaaaaaaacaaaaacaaaaaaaaaaaaaaaaaaaaaaaaaaaaaaaaaaaaaaaaaacaaaaaaaaaaaaaaaataaaaaagaataaaaaaaaaaaaaaaaaaacaaaaaaaaaaaaacaaaaaaaaaaaaaaaggggggcccctcaaaaggttcaaatattcctttctcttgcatgcaacttcaaacccctcccaaattttccccaaatttcattccacggggcgtttttttacaactccgtcctgggaaaaccccggtcctttcacattttactccccttggagaaaatccccttttccccatttgggttaatatgaaaagggcccgcaccatttccctttccaaaaatttcccacccttaaatggcaaatggaacc

SEQ ID NO: 16920 - DNA, 68 bp, Zea mays
  Clone ID: LIB83-008-Q1-E1-E7
aaaaaaaaaaaaaaaaaaaaaaaaaaaaaaaaaaaaaaaaaaaaaaaaaaaaaaaaaaaaaaaaaaaa

SEQ ID NO: 16921 - DNA, 57 bp, Zea mays
  Clone ID: LIB83-008-Q1-E1-F5
aaaaaaaaaaaaaaaaaaaaaaaaaaaaaaaaaaaaaaaaaaaaaaaaaaaaaaaaa

SEQ ID NO: 16922 - DNA, 102 bp, Zea mays
  Clone ID: LIB83-008-Q1-E1-G1
aaaaaaaaaaaaaaaaaaaaaaaaaaaaaaaaaaaaaaaaaaaaaaaaaaaaaaaaaaaaaaaaaaaaaaaaaaaaaaaaaaaaaaaaaaaaaaaaaaaaaa

SEQ ID NO: 16923 - DNA, 410 bp, Zea mays
  Clone ID: LIB83-008-Q1-E1-H7
tcaagcttgttaataagcagctctagtcctgatattggcgagaccagtgaccaagtgcaggtggattcttgtcaatacttgataagcagccatacgggtgattgtagggtctcatgtcctgacaacagttcgttggatacttctggtaaagctcatgatgaagagagattggatcaggccttaataaccaagcatgacagtgggatgatgccttctactagtaaccagacatcattagatgctactgtaggcactgagagcagtgctgaatatatgaagcatgatgtaagccattgcgatgacttcaatatcagagtcaatgaccaaagcttgaaccaggcgttaagaaatcagcatggtgatgctgtcccattacctgacatggtatcactagatgctaaggtggacaa

SEQ ID NO: 16924 - DNA, 343 bp, Zea mays
  Clone ID: LIB83-009-Q1-E1-C5
ttacaatacatcgtacgatggaaggttcaacgcatagttcacgcaatttatgatgtccacgggatgttgagtgtcgtcgcagttggtttggcaactgagatgtctgtccaaggaaaggtctggaacaatgttgtgtatgtggataagcttgtgtagcagttcagataactgccaatcgagcagcatacaatacctgacgttggatttcagcaacatccttacgtgtatcgtcacaagggcgcaattgtagttcgatgatctccacacatatactacaaggacttacagttgatatctgacagttcggaggcctcaagtatgtaagatcttgcaatgtgatatt

SEQ ID NO: 16925 - DNA, 340 bp, Zea mays
  Clone ID: LIB83-009-Q1-E1-D11
acccgtgggcggacgcgtgggacgcgccgtacgggcagggcttcgcgcggcacaaggccaccggccgattctccgacggcaagatcgtcaccgacatcaccgccgaaacgctcggcttcgagagctacgcgccgccgtacctcagcccgcaggcgtcggggaagaacctgctcaccggcgccaacttcgcctccgcggcgtccagctactacgacgacacggcggccatgtatgacgcgatcacgctgacccagcagctcaagtactacaaggagtaccagtcgaagctggcggcggtggccgggcgcgctatgggccgcgccatccttggcgacgcgct

SEQ ID NO: 16926 - DNA, 291 bp, Zea mays
  Clone ID: LIB83-009-Q1-E1-E3
atacgacagcggtcgcgtgggcccacgcgtccgccgacacctccactcggcttctgcttcgtcaccttctccacagaggactcgatgctcatcgccatcatgggcatgaaccgtaaggagcatcgacggccgcaccatcaccgttcacgaggcccattccctctgcggccgtggaggaggccgtggcggatactgtgacgggcgccgtgatggacgcggatactgcggtggcggtggaagctaccgcggtggtcgtggacgctaccgaggctgtgggggatacagtggtgc

SEQ ID NO: 16927 - DNA, 147 bp, Zea mays
  Clone ID: LIB83-010-Q1-E1-B3
tctgcagaaagatagatgcctaaggaggtgctgaaaaatgtagtttcgtggtcaaacatccttgttgacaccattttccaccttgtgttattcacatggaacttttcttcaaacaaagttttgttaatcaaaaggtaccaaacatac

SEQ ID NO: 16928 - DNA, 259 bp, Zea mays
  Clone ID: LIB83-010-Q1-E1-D10
agttcaacacagtgaactacgccggcgtgtccaccaacaactacgccttggacgaggtctcagaggtgaaatgagtggggccggccggctcaaaggctccgcgctagctaccgtgtgattgatttgtagtagttgtgaaatgaagctgtgaagctgcatgctgtgctggctaacgtcacaacatcgatcctatgtgtaatagcataatccacataatcatatcatgtaattgcgtgctttaaaaaaaaaaaaccaaaaa

SEQ ID NO: 16929 - DNA, 239 bp, Zea mays
  Clone ID: LIB83-010-Q1-E1-D8
agggaaacttgtaatggtcccaaacttttgttccatgttgatctgcagagttcacatggctatgtttacttcacgtatttttgccgaagttgttctgggattgcttaacatgctaatatccttcttctgtacgtgctgatttataactcctgtttctttcaactaggctcatgcttcttctaatggcgacctaataatagaccatgctggaacttttacaagacataaaaataaaaaca

SEQ ID NO: 16930 - DNA, 390 bp, Zea mays
  unsure (1)..(390): unsure at all n locations; Clone ID: LIB83-010-Q1-E1-E9
aacagcttaagaagggagcgaatgaagcgacgaagaccctgaataggggcatatcggagtttgtagtgatggcggcggacacagagcctctcgagatcctgctccacctccccttgttagctgaggataagaacgtgccatatgtgtttgttccatcgaagcaagctcttggccgtgcttgtggtgtgacaagaccggttattgcttgctcagtgaccagtaatgagggtagccagctgaaactacagatacagggtctcaaggactccattgagaagcttctcatctgatctgccgaagacctttcagtgtgatgggcctcatcgacacttttttcagaggcttggactggtgatggtgtcntgtttactttgcgcttttcaaactata

SEQ ID NO: 16931 - DNA, 233 bp, Zea mays
  Clone ID: LIB83-010-Q1-E1-F5
aaaaaagcaacttatgctgatgagaggttggtgacgattcttggctactggctactgtaattagcttgagctactattctggttgcagcatctgtggctgaacacgagtaccatatctgagtgtcataagtcatgttgcgaagaacatgagtagcatatttcaggtgccgtttggttcatatatttgtaatgtaatgggtaacggataacgttagaggggaagggtccgcgat

SEQ ID NO: 16932 - DNA, 372 bp, Zea mays
  Clone ID: LIB83-011-Q1-E1-A2
tgttaatccactcgtgcattcttctagagcaaaaagacctagacaaaacgttcctccaccttcacttgaatcatctgttctcacaaaagaaggtgcaaccaaggtcgaaatcgattcagctcaaacacaacaccaaaattcggtcttgcaaggtcaggagcagatgaccttgaggaacaacctgactgaaagcgctgattctgattccactgttcagaagccgatgatgtggtccccatcactcaatgggaaagcccacactcattttcagcagagacctgctatggataattggatgccattgggaaggcgtgaaaatgacttcaaggacacccgttctgccttcaaggatgcccgcaccgcctctcaatc

SEQ ID NO: 16933 - DNA, 185 bp, Zea mays
  Clone ID: LIB83-011-Q1-E1-C1
tgtacaacaattaatgcaacaaattaagtacgtacttaatttgttgcattaattgttgtacatgtgaggaaaacaagtagagatggatgcatcatccatcgacgggcggagtacatacatgtacaacaattaatgcaccaaattaagtacgtacttgaaaaaaaaaaaaaaatataaaaaaagaa

SEQ ID NO: 16934 - DNA, 242 bp, Zea mays
  Clone ID: LIB83-011-Q1-E1-C12
tcctccgcggcaggtaggccaaatcccagcgaagcccggccatggcgatcgccgtcgccgtggtggcaggaacgcagctctcagcgacaacgctaccattttgtaactactgcggtgtagtatatatatgcatgcattcgtacgtgatgcgagctgtgttttcggtccgatgggagcgcgtcctgtgactgtgactggagtaaaaatttaccgagcttctggagagtatcacattgtgtatc

SEQ ID NO: 16935 - DNA, 352 bp, Zea mays
  unsure (1)..(352): unsure at all n locations; Clone ID: LIB83-011-Q1-E1-C3
tgccagaccagtcgccgcggcccgtgcgcttcggtatcctgggctgcgccgccatcgcgcgaaagctggcacgcgccatgctgctcgcgcccggcgcagccgtcgccgccgtcgggagccgctccgaagtgaaggcccgcctcttcgccgccgacaacggcctcgacgtcgccaccacccgcctccacggctcgtacgatgcgctcctcgacgacccggacatcgacgccgtctacatgccgctccccaccagcctccacgtgcgctgggctaccgcagccgccgcacgtggcaagcacgtgctcctagagaagcccacggcgctgtgcgccgccggactcgacnacatcct

SEQ ID NO: 16936 - DNA, 392 bp, Zea mays
  Clone ID: LIB83-011-Q1-E1-D5
taaggtggagggcacaggctcgggattcgtgtgggactccacgggccacattgtcacgaattaccacgtggttgcgaagttagctggagacggatctgcatctcatcgctgcaaggtgtttttggagggttctggtggcaaaagttactcaaaggaagcgaggctaatagggtgtgatccagcatatgatcttgcggttctgaagatagatgctgacagggaccagctgaggcctgctctgattggcacatcacggagtttgcgagttgggcaaagctgctttgccattgggaacccttatggatatgaacacactctaactactggggttattagtggattggggagggaaataccatctcccaatgggagagcgatccgtggggctatac

SEQ ID NO: 16937 - DNA, 336 bp, Zea mays
  Clone ID: LIB83-011-Q1-E1-E12
ggacgtgtaatcatttactctgtgcaagtttaccagtgatgcaatctgtatagatgtgtgtcttgtccagccatacgtataccggagatgaaaggagacggaggcagtgaagaaatatccttttttttcttctcatttttcacgaggatgcggtgcactgctcccagaatgctgtgtccaatttacaaacgcacaggtggcacatgaactagcagagtagctttatcttgaaaggaaactgtatttggggtcgatgaaccctctggtgttattcttcagactggtaaacgatgtaacatgtttgataatcaataaagtgcgtcgtatggctttcct

SEQ ID NO: 16938 - DNA, 380 bp, Zea mays
  Clone ID: LIB83-011-Q1-E1-G11
tgcaggaggatccggtgaaccaataccaacaattgtgtatgacgatgaagactacaaggatgtttttgtgtcagaggcttgcttgctcactcgcgacgagaacgagtggtacagggaaccaatctcggccaatgccacgtctggcaaagaaggtttgcaagcctcggttgctgactgatttaagtcaggttctgtatcagttttgtgactattatacagatacaggatttgatcaacgcctcgacatggtaggaaagaacactacggtataggcggggattgttcacaagacaatctggttctggaatggaccattttcagtatagcaactattgatttgagcaacagtcagactaatggttccaggagaaatttatccc

SEQ ID NO: 16939 - DNA, 379 bp, Zea mays
  Clone ID: LIB83-011-Q1-E1-H6
tccatttctcaccagaagcgaaggcggaggcggaggagcggaggtaggagatctcgagcaaggcggaggcggaggagatgaagacgttcgacccgtggccggtcttcttccgccgggagtggaagcgcaactggcccttcctcacgggtttcgccatcaccggattcatcatcacgaagatgacggccaacttcaccgaggaggacctcaagaactccaagttcgtccaggaacacaagaagaagcactgacgaaccaggtgaaggagttgtcagaaacgcatgtttggccagccagttctgttatgcttttgaatgaaaaatttagacccctctttctcgtttccttaatcgaaatgcttgaactctatgttccattt

SEQ ID NO: 16940 - DNA, 375 bp, Zea mays
  Clone ID: LIB83-011-Q1-E1-H7
aagcaagcaagcaagcagcgagtacatacatactaggcagccaggcagccatggcgcccaccgtgatgatggcctcgtcggccaccgccgtcgctccgttccaggggctcaagtccaccgccagcctccccgtcgcccgccgctcctccagaagcctcggcaacgtcagcaacggcggaaggatccggtgcatgcaggtgtggccggcctacggcaacaagaagttcgagacgctgtcgtacctgccgccgctgtcgacggacgacctgctgaagcaggtggactacctgctgcgcaacggctggataccctgcctcgagttcagcaaggtcggcttcgtgtaccgcgagaactccacctccccgtgctactacg

SEQ ID NO: 16941 - DNA, 339 bp, Zea mays
  Clone ID: LIB83-012-Q1-E1-A6
aagaaactactagctggtaccctaataataattctgctggctgcggcgatcccaaaataaaagaggccgggtgcgatgcatctcggacttctcgagtggtgtttgcgtcagacagccagccactgtggggctagtgttccaacatttgtcagcctgcttgcgcgaggaaggggggtcactgactcaagagaagggcctggtcataggctgctgcattatgaatttctgatgatgtcttatgtctgtactctgaatcaactatgtatgagatctcatctcctttctcctactgaatgaatgaatcattattggctttgctttgcttcaaaaaaaaaagaa

SEQ ID NO: 16942 - DNA, 419 bp, Zea mays
  Clone ID: LIB83-012-Q1-E1-B4
tgcgattcaatgttaaggaagctcactggcttggggagagaatcaaggaacggatattacaagcggagaagaataggataaataaagatggagagcttgttatatcttctacaaaaactagaacacagaagggcaatattgaagatgcattgcagaaaatacaggcaatcattgatgctgcatcatatgttcctccacccccaacagaagaccaaaagaaaaagattgaaaaaattgctgcagtcgctgaaaggaagagacttcagaataagaaggtgctttcacagaagaaggaatttagacggaacagaactagctgggattgatgcaagcttgttctcggggtagcaaaagcattcggctgatccttacagcagtggtgtacagagaccgacgaaaaacaggggtcagacttgctg

SEQ ID NO: 16943 - DNA, 421 bp, Zea mays
  Clone ID: LIB83-012-Q1-E1-C3
aagctgtccagatcgcgtgattccgcatcccgttcgcgagcgcgacacacgctgacagctcacggctgaccttcccgacggcctccagctccatcttgattcttgaggcgaagccccggtgcgtaagagtctgccatggccagcgagaataaggtctttgggttcgaggaagtcgccaagcacaacgtcaccaaggactgctggatcatcatcgccggcaaggtgtatgacgtcactccgtttatggatgagcatcctggtggagacgaggttttgctagctgtaactgggaaagatgctacagctgatttcgaagatattggccacagtgattccgcaagggacatgatggagaagtaccacatcgggcagatagatgcgtcaacaatcccagcaaagcgtgctcatgtgcacccccagc

SEQ ID NO: 16944 - DNA, 362 bp, Zea mays
  Clone ID: LIB83-012-Q1-E1-D11
gacggagtgcttgcagcgggcggcaggtaagccaaccgaaaccgatggcgtcgggctccggcggcgggagcgacttctccgtggtcgtggtgggatccgacttcgcggtcgacgccggcgccgcgctcctcgcccccggcgaccacgaggtgtggcacgactgcctccccgtcctcgctgaggcggacgcctgcttctccgacctcgaggagcgccaggtcgtgcgcatccagggcacggatagggcaggccgaaccatcgtccgcgtcgtcggcaagtttttcccggctccagtaattgatggtgaacgtctgaagaagtatgtgttccacaaactgcgcacccaatttgccggtgggtcc

SEQ ID NO: 16945 - DNA, 162 bp, Zea mays
  Clone ID: LIB83-012-Q1-E1-F1
tgttaattatgttgaagatattgatagacatatatgccatattttggctagttcataacatgtaaaataggtttgggattttaagcaggcagccaatagtttcgacgtgaatagtagtggtgaagtagtgatttgctttatgaaagacgtgttggcacctta

SEQ ID NO: 16946 - DNA, 426 bp, Zea mays
  Clone ID: LIB83-012-Q1-E1-F3
tgaagaatgacaccgcagaagggcagaacgccatgccagcaaacgaaaattaaagaacactgatactgttactatgccttcagactctgagaaggatcgggattctgattcagatggtgatgttaggaaaagagtttcaaacgctggaagagaagagtctgatcagaagaaactagaaattgaactccgtgagaaggcccttgaatctcttagagcaaagaaagccgtcaacaactagactgagaatttttttgtgacacatttgagtttctattttcaagtggaagtgtccttatatgatactatttaatgttctgtgtgtttatgtggcagttgatctgatgattcctgagctgtttacttgatgcagctgaattcaggcttagcagccagttatctgattagctccatgtgcacaagcttttt

SEQ ID NO: 16947 - DNA, 55 bp, Zea mays
  Clone ID: LIB83-012-Q1-E1-F4
agcaaggataatgcaccacacgtgcacgccacacttgtagtccactctgacagtc

SEQ ID NO: 16948 - DNA, 116 bp, Zea mays
  Clone ID: LIB83-012-Q1-E1-H9
ctcacacgtccgaggtcgcgtgggcggccgcgttgggaagacttgtgcttaccgccaccatcatgctagtgtcgatgtcattagggaactgactcgcatcgatggtcgtagacctg

SEQ ID NO: 16949 - DNA, 95 bp, Zea mays
  Clone ID: LIB83-013-Q1-E1-A2
aaaaaaaataaaaaagaaaacatagacaaacacaaaaaaaacaaaaaaacaaagaccaaataacaaaaaacaaaaaaaaaaaaaaaaaaaaaaaa

SEQ ID NO: 16950 - DNA, 416 bp, Zea mays
  Clone ID: LIB83-013-Q1-E1-B12
aagctctggagcccttcttcagcgcagctgctactcagtttatccttggacagcaagttcccttctctctgtggctttctcttgcccctgttgtcatcggtgtttcaatggcatcccttactgagctctcattcaactggactggcttcatcaatgccatgatatcaaacatctcattcacctacaggagcatttattccaagaaagccatgactgacatggatagcaccaacgtgtatgcttacatttcaataattgctctcattgtttgcattccgcctgcagtgatctttgaagggccccggctaatgcagcatggattcagtgatgccattgcaaaagtaggcttgacaaagtttgttagtgacctattcttggttggactgttctaccatctgtacaaccagattgctacg

SEQ ID NO: 16951 - DNA, 332 bp, Zea mays
  Clone ID: LIB83-013-Q1-E1-D11
aaagacatctagaaacatagatgacactaatgctaaattttgtagctgaagatcagaccactaaatattcccacgaacacattactgttaggttgggggatcattaaactcgagctaagacacaaatatgtagatgaaattagtgctgctgttcatgccttcgttggagttagccattacaggacacaagaatttagtaagaggtttggtaaaccttttccagtgcaggagcagctgcctgatgagttggtagagtggttgctttcagtcaattctctagggtgcctatctctatttaacttgatgctgcacactgggggctcccttcagtc

SEQ ID NO: 16952 - DNA, 212 bp, Zea mays
  Clone ID: LIB83-013-Q1-E1-E3
cttcggcaacgtgatcttcacggcgacgccgctggccaacgccggcacggtgacggccggggtggcagagggcgcgtccgtgatccaggccgcgttggaccggatggacgacgggtactgccggtcagcgctggactacctggagctgcagccggacctgtcggcgctggtccgcggggcgcacacgttccggtgccccaacctggggctca

SEQ ID NO: 16953 - DNA, 363 bp, Zea mays
  Clone ID: LIB83-013-Q1-E1-F11
tggagatttggactataagagcgagcgagcgagcgagctgggtgccttgaggacgccgtcaagaaaccgcgtggaggggggggagggcgatgagatgagggatgctggccgcggtgatggactacttcagcacctgctggggcccgcggtctcgtgcggggcaccggggcaagggctccgacgccgccggccggcatgacggcctcctctggtacaaggactccgggcatctcgtcaccggggggttctccatggccgtggtgcaggccaaccagctgctcgaggaccagagccaggtggagtctggatcgctctccctggctgactacggcccgcagggcaccttcgtcggcgtctatgatg

SEQ ID NO: 16954 - DNA, 404 bp, Zea mays
  Clone ID: LIB83-013-Q1-E1-G11
tactcaggctgctcgcaactcccatcctccccctcccggagtacgaagtaccagagagagaacggctttcctctagcaatggcgggtggccgcgccggcgacgacgacgtggtggtggtgaactgcggcggcagctgcggcggcgaccccggcgcatacgccgcggtgctcaacaggaagctcgacctgtactgcgccgccgtcgctaaatccatggggtggttcctcctcctcctacccctccaaagattagacctttctaggcctacttgcgtattggttgtgtgattgtgccttgtgtgcatcgatctgtcaatttcagctccagcttaatttccagtctcaatggtaagaagtgcatgtctttcagttacttccccccatcatttttgggaggggaattt

SEQ ID NO: 16955 - DNA, 423 bp, Zea mays
  Clone ID: LIB83-013-Q1-E1-G3
tgctgactttggtctgtctatattgggtcctgcagatagcggtaccccactgtccgagctgccagcagggactcttggctaccttgaccctgagtactaccgtctccactacttgactacaaaatctgatgtctacagcttcggggttgttctcctggagatactaagcggcaggaaagcgatcgacatgcagttcgaggagggaaacattgttgaatgggcagtaccactgatcaaagcaggggacatttttgccatccttgatccagtcttatctcctccctcagaccttgaggcccttaagaagattgcttccgtggcatgtaagtgtgtcagaatgcgaggtaaagatcggccttccatggataaggtgacgacagctctagagcatgcccttgcactgctgatgggcagcccctgcat

SEQ ID NO: 16956 - DNA, 360 bp, Zea mays
  Clone ID: LIB83-013-Q1-E1-H7
tgagtcacctgttacccagtgtgacctggaccgacttaaattgtcaaccgccccctttatggaaaggaacttggaatttctgattgggtgcatggatgatctttcatcagagcagaacaagttccaatattataaccgcaatctctcaagacaacagtcacagcagcaggcatggcttcaaaagagaaggcaggagaacatggcgaggaaagcagctggtgaggagccactaccagaagaagatccatccaatcctatatttaagcctattcctgagccctcacgattggagggctatctagtaactaatcagatctgcagttactgcaaccatatcaacggggttgctggtcagaattt

SEQ ID NO: 16957 - DNA, 415 bp, Zea mays
  Clone ID: LIB83-014-Q1-E1-A12
tgatcgctcagcacaaagcgtcgtacttggataggagaaaacaattctagacagtcgacagagagagagaaacaaaaaatagagaactgagagatcgaggacaaagggggagaggagatgtctcggggcggtagccacggggagctgggccataggatcgattacgtcttcaaggtggtgctcatcggtgactccgctgtgggcaagtcgcagctgctcgcgcgcttcgcccgcaaccagttcaacctcgactccaaggccaccatcggagtcgagttccagacccgcaccctcaacatcgacgcccgcaacgtcaaggcacagatctgggacaccgcatgccaggaaaggtaccgagcagtaacaagtgcctactacaggggtgcagttggggctatgttagtatatgacataa

SEQ ID NO: 16958 - DNA, 399 bp, Zea mays
  Clone ID: LIB83-014-Q1-E1-C12
taggttccggcactctcacgctccatcgactcttctggaagagttgatcagtgggcagaaactgtggaaggaaggctccagcgtttgcactcgcctgaggcctatgaaatgatcgagaaccatctcgccctcattctggggcagcgtcagagtgatgccactattgcagccataagtaagctccgtgttggccaggtctatgccgcatctgtgatgtatggctatttcctgaagagagttgatcagaggtttcagctcgagaagacaatgaagagcctcccttggggatcagaagaggaagacggcgctttgtatcaagttatgacgaccgactcgatgccttcagctcagtcttctagctctcacccagagatgggctcctggaccgccgcgcctgac

SEQ ID NO: 16959 - DNA, 613 bp, Zea mays
  Clone ID: LIB83-014-Q1-E1-D9.F2
ggggtttttttttttaaaaatatttttttttttttggggggtttttttttattttttgttttttatttaaataaggaagattggtttggttgaaagggaaggtggggttgttttattaaatttttttgttaaaacccccccccccccccaagggggggggccggcaaggaaattggaaaaaaaaaaaaaccccagggggcgaaaaaaaaccccccttaaaaggagggcccgggaaaaccaaaaaaattaaggggggaaggggggggaaaaaaaaagggccgggaccccccggttttaaaacaacaaggggaaaagggggggggaaaaacggggggggggggggcccaaacccaaaacccaaaaaggggggcaaaaagggggggaaaaccccccgccccaaaaagggggggccaagggaaaacgggaaccacaccccaggggggttaaaccccccccgggcgcggggccccacccggggggaacgaaaggccccgaatttttttctcttcctcgggaggggggggagaaaaaaggggccacaaaaaaaaaaaaaggggggggggggggggggccgcatctggtggaggggaaaaaaacacacacccgggggggg

SEQ ID NO: 16960 - DNA, 592 bp, Zea mays
  Clone ID: LIB83-014-Q1-E1-D9.R2
cggacgcgtgggcggacgcgtgggcggacgcgtgggcggacgcgtgggggacttcaagaacttcatcagcctctgcctacagaagaacccggtgaaccgtccgtccgcgatgcggctgctgcagcacccgttcgtggcccagccgcagccgcagcccctggccgccccgccgtcatgatggctcgccgaaatccacaattcatgaccgatttgattgattgattgcttcccgtcgtggtacaactgaaggcggcgggcggattgatctctcaccttgtcgcctgacctttggggtggatggatggttggttgcatgattggttgtggatggccatgagatgcggtacctagagacgttcctcctaatcctagctaggcatgcaagtggctcaggacaagccgctaacccgcagggctgaccgcacctcgccgcaacgacccgcatgcgcataccccgacggcgtactggagctcggaaaggcgcgcacatggcgttccgcggattatggcgccgccttgtatttccctgtccgatcgttgaagcagcagcagagggatcgagttgatgcatagcatcagaagacgagagcca

SEQ ID NO: 16961 - DNA, 161 bp, Zea mays
  Clone ID: LIB83-014-Q1-E1-E10.F1
aacccgaaacgttgcatcagcttcaaattttctcattatcaactctatttactccaattccttctagcagcttaaatttacatcgggcaacatgttgctagtagccaaaaaaatctccgggagctgtgcagttactcaaaattttggcttgggggtgtacc

SEQ ID NO: 16962 - DNA, 609 bp, Zea mays
  Clone ID: LIB83-014-Q1-E1-E10.F2
aaacccgaaacgttgcatcagcttcaaattttctcattatcaactctatttactccaattccttctagcagcttaaatttacatcaggcaacatgttgccagtagccaaaaaaatctcccggagctgtgcagttactcaaaattttggcttgggggtgtaccatgaaagagagggtcaccttttgtacaggccattccatggctatgttattctctcctttttttttccaaacgacacaaactgaatccacagtgatgctaaccaaactctatagtttaccgtatatatcatatctggaccaaagttagacagaataacagagagctacttatgatcacatcatcccactgtccaccctcgttctgcaatcacttcacgaacacgagtagctacttcaatggcgtcatttaggggagggtagctccagctatttgaaatatcttccaatccagtgaacgggcgaacaacccctcgctcccgtagagtcttgtgaaaagccgaaaacttccatttacagtgttcggtcccaataacataaacaggtttccctgtgctacctgcctcacttaacatacttatcgagtctgctgttatgacaaaagcatcaa

SEQ ID NO: 16963 - DNA, 277 bp, Zea mays
  Clone ID: LIB83-014-Q1-E1-E10.R1
gttagatcgttgcttgtggctgggacaccatatcatattcaagcttgataaggaaagtagcttcagataatgtgttcgtcatccagatccaacacccacgatctcgccttgataggtttgatttagtggtgactcctcgccatgattactatgctttaaccgctagtggacaacaagaagttccacacctgttccgcagatggattactccacaggaaccacccaggaagtaatagtggtacttgactgttaggtgcactacaccaggtctgattct

SEQ ID NO: 16964 - DNA, 657 bp, Zea mays
  Clone ID: LIB83-014-Q1-E1-E10.R2
cgttagtcgttgcttgtggctgggacaccatatcatattcaagcttgataaggaaagtagcttcagataatgtgttcgtcatccagatccaacacccacgatctcgccttgataggtttgatttagtggtgactcctcgccatgattactatgctttaaccgctagtggacaacaagaagttccacacctgttccgcagatggattactccacaggaaccacccaggagtaatgtggtacttactgttggtgcactacaccaggctgattctgctgcgctacggcttgctgctatagcctggcatgatgaactcgcccctttgcctaagccgttgctaattgtcagcattgggggccccaccaggaattgtaaatatggtgtagatcttgccaggcagctcataacttctctgtataatgtgctagatagctgtgggagtgtcagaatctcattctctccgagaacaccatggaaggttgctgatactatatttaaagaatttgctggacatcccaaggtctatatttggaatggtgaagaacctaaccctcacatgggacatcttgcatgggctgatgcttttgtcataacagcagactcgataagtatgttaagtgaggcaggtagcacagggaaacctgtttatgttattggga

SEQ ID NO: 16965 - DNA, 229 bp, Zea mays
  Clone ID: LIB83-014-Q1-E1-E9
agagggcacgccgctgttcaaagacagatacccgcctataaactcctatatacagccttgatgcatgtactcggctcgtcgcgcgccacgggcatgcaggcagcaacaaagaggccggtttcttcacctaaaaatctgtgtagaacattacgatatatcatacagtctaataatacccgtgctagtacatgggaaaggttactatctagaaaacgacactgacaaggga

SEQ ID NO: 16966 - DNA, 224 bp, Zea mays
  Clone ID: LIB83-014-Q1-E1-F1
gaatcagacagttctgagatgcaagtcacggagcatagtacaaactcagcacagaagcagaactagacatgtgatccagacagccaagatctgagatctgacggtagatatctgatgaaatcattttacgcattccttctcagtaatagctgacaaatctgatgagaacgatctcaactcgagagtttcaattatgctattactccgtccaaaatccgtctaac

SEQ ID NO: 16967 - DNA, 313 bp, Zea mays
  Clone ID: LIB83-014-Q1-E1-F6
aggagaagaggctgcagttcgcgattgccaacgacagctccacttcgctcagcttcatggcagcgctgtatgcttcgcggttcgctgggaatatgatacggatcctgaggagaaacgccacgcgcaaggccaggctgcaggaaagagtgcccgcgagactgctgcagaaaccggctgaacccaacttttccgcagaagagcagtagtatttcgcttctctgacttctcgttttgcagatacagatatgggaaattgtttgcgtgacttgcaagcccgaggatggcatgcccagattaaaaagaataacaaaaa

SEQ ID NO: 16968 - DNA, 537 bp, Zea mays
  Clone ID: LIB83-014-Q1-E1-G10.F2
cctaacttaatatgatgccattaaacaacaatgatcttacagctacatatattttatgctttgtaatatttgaaagaccatgggacatcgctctgattacatagtacagtctacagtctacagataatgttacgtttcctgatatccaatggtacttacaaacgaactgacagattctaggagcatgggataacttcgtttttccaaagcatataactgcaacacaagcaacctccctattagttctgtacaattccgcagcaacattaatttttgctgaggattgaagttcactattttcaccatttagcaagctaatgttttacctactgcagacacctgcttggcaatccagtatatgatagagacgggcacagcaataaatcaaaccaagggttagcaggtgtctgcatactggaccttcgatttaccaataaaccagtttatgaataaaccaagtgtatatgttgcatactggaccttcgatttaccaatctgtccattacgatcagcgattaaaccgtaaggtttaggaaa

SEQ ID NO: 16969 - DNA, 641 bp, Zea mays
  Clone ID: LIB83-014-Q1-E1-G10.R2
cccacgcgtccggccgccgataaaacggccagccgggcagcggagacgcggagtggggcgcgacggcgcgtaacctgtggggtttcaggttttgtccctgcgtggcagcgacccagccccatcgagcatcgaggcatggaaccgggagccaaatcggaagcaaagcaaggtgaggcgggatctggcgcgggggcaagcggcagcggcaaggtgtatcatgagaggcagaggctgcaattctgtctcctccatgctctcaacaaccttatgcaggaaaaggaatgtttcacccgtgttgagttggacgggattgctggaaatcttgttctcaatgatccagacaagggccaatggactcctctaccattcatttttaaacctcaccacaatgttataactgggaactatgatgtgaatgttctcatcacagcattagaagctagaaacaagaaggtggtttggcatgatcgtcgtaaaggggcatcatcggttgatctgaatgcagaaacattggtaggcctgatgatcaatgtacctatcaggaggttcagggggctttggactggcaggcattgggtggcaattcgacgcattgatggcatctggtttaatttggacagtgatctttctgaacccaagca

SEQ ID NO: 16970 - DNA, 121 bp, Zea mays
  Clone ID: LIB83-014-Q1-E1-H10.F1
gccgagagctagtactggatgatggaacggtataggtgttgggaaccagttggccgggatgacctggttggcaccagcgtcttgccggactcgttgggtgatgcgcggtgagaagggcgcg

SEQ ID NO: 16971 - DNA, 612 bp, Zea mays
  unsure (1)..(612): unsure at all n locations; Clone ID: LIB83-014-Q1-E1-H10.F2
gagagctagtactggatgatggaacggtagtaggtgttgggaacccagttggccgggatgacctggttggccaccagcgtcttgccggactcgttggtgatgcgcagggagaagggcgcggcgaggcggtggccggagtccagccgccagatggacccccacgactcgcgcatcggcgtccacgacccggagttggcctccatgaggtccacctgcaccacgtcgccgtcgccgtcctcgaactcgacgagcaccgccaggtacaccgggttggacccctcctcgatgtggaacgtcaccttctgcccggggtagttgcagggcaccctcttgaactggatgtcgatgatgccggcgtggcggagctcgtcggtgcggccgggcttggccatggcgccgaacgccgtgccgctgaggtcgaagtggtacttggccacggggtagtagttcatgtcggtgatgatcaccgtctccggattgccggagcaggctgggtggttntggcatcgtatctggtagcaggagccgcagcccttgccgtccttgaagaggggctcgttgccgcacgatgtcatcgccgagacggcggcaggttcacgttcttgatccaca

SEQ ID NO: 16972 - DNA, 209 bp, Zea mays
  Clone ID: LIB83-014-Q1-E1-H10.R1
ggagcaaaacaccttcctcctgtcgtctgcctaccagtagctagctctaatacatagcagccctcgctcgcaaggtactgcactacggtggccgccacctcctcctccacctcctccacggtagttgtccttgcggcgcttctcttcttgctccttgataacgtgtggctcgtgcgcgagaaccggagagctttaacgcctccgacttt

SEQ ID NO: 16973 - DNA, 654 bp, Zea mays
  Clone ID: LIB83-014-Q1-E1-H10.R2
cggacgcgtgggcgaacttctcctgtcgtctgcctaccagtagctagctctaatacatagcagccctcgctcgcaaggtactgcactacgatggccgccacctcctcctcctcctcctccacggtagttgcacttgcggcgcttctcttcttgctccttgtaacgtgtggctcgtgcgcgagaccggcgagctttaacgcctccgactttaccgccgaccccaactgggaggctgcccgggccacctggtacggtgcgcccaccggcgccggccctgatgacgacggtggtgcctgtggattcaagaacgtgaacctgccgccgttctcggcgatgacatcgtgcggcaacgagcccctcttcaaggacggcaagggctgcggctcctgctaccagatacgatgccaaaaccacccagcctgctccggcaatccggagacggtgatcatcaccgacatgaactactaccccgtggccaagtaccacttcgacctcagcggcacggcgttcggcgccatggccaagcccggccgcaccgacgagctccgccacgccggcatcatcgacatccagttcaagagggtgccctgcaactaccccgggcagaaggtgacgttccacatcgaggaggggtccaacccggtgtacctggcg

SEQ ID NO: 16974 - DNA, 343 bp, Zea mays
  Clone ID: LIB83-014-Q1-E1-H3
aagcaatggcgtcctctcctctggcaccaaccaggacctgctcgccgctagtgcccaggctgccccgctgcccctcgctcccatccccgtgtatgtctccccgtcgcagtgcacggtggccgcgcttggcgtcagtcagagcgactccgggcagcatctggaccgccggggcgactgatgagcataagaggtgcctgacatgcggtggctcttaccgagacgacgagaaacattcgagcgcctgcgccttccatggccacgtcacacgcgagaaggggctgttctccctgtctgccacgtaccatggcatcgacagtgagtggggcgacaagagcggggtcat

SEQ ID NO: 16975 - DNA, 413 bp, Zea mays
  Clone ID: LIB83-015-Q1-E1-A4.F2
atagaagacctgaattaggtaaaaccgccgagaactaatcaatgagggttaaaagtactgcggtgaacacaattgccacatgaagattcgcaacatttcttagatgacggtacataccgagaacctgagcctgataatatgctcggtccacctaatggccaagagggaacgccttactcactggtcagaaacaaagctggtcgctttacacctagcactgagacgcattctctcaccactgtcttcagcgccgcactgaggcgaactctgacctgtaacaatgggactccctaagaactcgagcatcaagaacatgttgagactgtggcttttgaccgccttaacatggagctgacataagcctcactttcagtttgagatggccaatgaggcaaaccttgcgtcagaataca

SEQ ID NO: 16976 - DNA, 75 bp, Zea mays
  Clone ID: LIB83-015-Q1-E1-A4.R2
cagactcttgggaggcccctatagacggtgcgcgagacggtgtttgaagcaaagtgcgtggcagggtccgggagc

SEQ ID NO: 16977 - DNA, 373 bp, Zea mays
  Clone ID: LIB83-015-Q1-E1-A9.F1
aattaaacaattcagttttgacctgtttttttcatttagaaaaaaacattgcctgttgagcacaactagcaaagacagaagtttgatcagagatacaaatataataaaatacaaccagaaaattacatgatttttgacaaccgtaccagttccacaatttataattaaaatgtgcaaattaggaagtagaaacttaacggtgaaaacatatcaaaatcactagtcgcgtgttgaattcaactcgcatctgtttaaccaatgtctccaaagatcacagatcagcccttccggggaaccttgggaagggtataacatctctgatgttctccattccggttgcaaatagaatcatccttacaaaacccaacccaaa

SEQ ID NO: 16978 - DNA, 575 bp, Zea mays
  Clone ID: LIB83-015-Q1-E1-A9.F2
aattaaacaattcagttttgacctgtttttttcatttagaaaaaaacattgcctgttgagcacaactagcaaagacagaagtttgatcagagatacaaatataataaaatacaaccagaaaattacatgatttttgacaaccgtaccagttccacaatttataattaaaatgtgcaaattaggaagtagaaacttaacggtgaaaacatatcaaaatcactagtcgcgtgttgaattcaactcgcatctgtttaaccaatgtctccaaagatcacagatcagcccttcctgggtaccttgggaagggtataacatctctgatgttctccattccggttgcaaatagaatcatcctttcaaaacccaacccaaaaccactgtgctttacagatccaaagcgacggaggtccaagtaccattcatagggttccaaaggcaggccagcatcaagtatcctctgtttcagaacatctaaccgttcctccctttggcttccaccaatcaattcaccaaccttaggcacaagaacatccattgcagccaccgtcttgtatcatcattgagtctatataaaa

SEQ ID NO: 16979 - DNA, 455 bp, Zea mays
  Clone ID: LIB83-015-Q1-E1-A9.R1
gttaccgacaagaagtttgacaacaaagttgaatgggggaattgatttagcctctgagcatgaaaggtatttaacagaggatatatttaagaagccagttattgtctataactatccgaaaggaataaaggcattttatatgagactcaatgatgatgacaagacggtggctgcaatggatgttcttgtgcctaaggttggtgaattgattggtggaagccaaagggaggaacggttagatgttctgaaacagaggatacttgatgctggcctgcctttggaaccctatgaatggtacttggacctccgtcgctttggatctgtaaagcacagtggtttatgggttgggtttagaaagggtgaatctatttgcaaccgtaatggataacatcaaagatgttatacccttcacaagggacccaggaagggctgatctgtgatctttggaaacattg

SEQ ID NO: 16980 - DNA, 643 bp, Zea mays
  unsure (1)..(643): unsure at all n locations; Clone ID: LIB83-015-Q1-E1-A9.R2
gttaccgacaagaagtttgacaacaaagttgaatggggaattgatttagcctctgagcatgaaaggtatttaacagaggatatatttaagaagccagttattgtctataactatccgaaaggaataaaggcattttatatgagactcaatgatgatgacaagacggtggctgcaatggatgttcttgtgcctaaggttggtgaattgattggtggaagccaaagggaggaacggttagatgttctgaaacagaggatacttgatgctggcctgcctttggaaccctatgaatggtacttggacctccgtcgctttggatctgtaaagcacagtggttttgggttgggttttgaaaggatgattctatttgcaaccggaatggagaacatcagagatgttatacccttcccaaggtacccaggaagggctgatctgtgatctttggagacattggttaaacagatgcgagttgaattcaacacgcgactagtgattttgatatgttttcaccgntaagtttctacttcctaatttgcacattttaattataaattgtggaactggtacggttgtcaaaaatcatgtaattttctggttgtattttattaatatttgatctctgatcaaacttctgtctttgcta

SEQ ID NO: 16981 - DNA, 66 bp, Zea mays
  Clone ID: LIB83-015-Q1-E1-B2.F2
gatctatttcttgtccacgcgtacacagacacgtgggctagcgcgtgggcggtcgcgtggcatcac

SEQ ID NO: 16982 - DNA, 90 bp, Zea mays
  Clone ID: LIB83-015-Q1-E1-B2.R1
cccacgcgtccgcacacgcgtccgcggggaccgttcgcataaaaagcgagcggtagttctatacgaacgggcttacgtacacttgcattc

SEQ ID NO: 16983 - DNA, 61 bp, Zea mays
  unsure (1)..(61): unsure at all n locations; Clone ID: LIB83-015-Q1-E1-B2.R2
gcgcacgccgtttacgncacacgtacgcgggcgggtgggctaattatagatcgcgagcatg

SEQ ID NO: 16984 - DNA, 330 bp, Zea mays
  Clone ID: LIB83-015-Q1-E1-C12
cacagaccatcgagaacagctcgaacgttgggattgctgtggccctcaagccctgattggttatacagaccattttttccccttctaagttcctaccatgactgtttgggtcagatcagatcagctggggaaaacaaaactgttggggttcctggcatctttgtttgctgtagtcagttgatttaatgaactccgaaatgtctcatggcggaaaattttcggtcgcctgtgtagcgctctgttaaatgagcaaccttcacaataattcaagctcggtagaattctgaacttgttaaaatgacatttgcgaacgaatcagttggcaattat

SEQ ID NO: 16985 - DNA, 190 bp, Zea mays
  Clone ID: LIB83-015-Q1-E1-C5
gctttgaagagggcatctactacagatagagtttacacataccattgcgttagtcgagatgaactacgcagcaatgtataagcatgtctgctcttttgtctcagcctacatttgagattcagggcattggactaagatcgcctacttatgataataataataataataaccggatcagaacctgtgccgt

SEQ ID NO: 16986 - DNA, 411 bp, Zea mays
  Clone ID: LIB83-015-Q1-E1-C6
tgcttgtgctttccattgtacattgatctttttgatgcctaatttatcaagtccctgaaagttcaggtgtaaaaaaaaaaaaaaaaaaaaaaaaaaaaaaaaaaaaaaaaaaaaaaaaaaaaaaaaaaaaaaaaaaaaaaaaaaaaaaaaaaaaaaaaaaaaaaaaaaaaagggggcagctcaaaaggatcaaagctaaattacgcttaaatgaaaattaaaatcccttcaaaagggtcacaaaaattaaattaacgggccgtcgtttaaaaacgtcataacgggaaaaaccctggggtaaccaaactaaaccgccttgaagaaaatccccctttcgaaagcaggcgtaaaaccaaaaaggcccgaaccgatagcccttccaaaaatttgccaaccctaaatggcaaatgg

SEQ ID NO: 16987 - DNA, 62 bp, Zea mays
  Clone ID: LIB83-015-Q1-E1-G4
acgtcagcacatgaatgaaaggcaaaacaacaaaaatgataaaagatgagaaaaagtaataa

SEQ ID NO: 16988 - DNA, 268 bp, Zea mays
  Clone ID: LIB83-015-Q1-E1-G7
gcagagaactgcatgtacactcccgtctaccgcaaccaccggtagtgctgcggggatcaactttgcagtaataagacatctactatcaacgcggatggtactctgttgtttatagtccctgctgctaaccacccttgttgctggtgctgctggagaggcattgtacctgtccatgcatatatgatatatatacgttgtaacgttgtgaaagcagacaatcttgggtaccaatgtttgttactctttcgctcgatgaagatcctgtaac

SEQ ID NO: 16989 - DNA, 92 bp, Zea mays
  Clone ID: LIB83-015-Q1-E1-H4.F1
gtcgcgctcggaaccttttcccaacttgaatgatctcagcacacccaacgaattttggggggacaacaccttgcgatgttgcgagcatagga

SEQ ID NO: 16990 - DNA, 584 bp, Zea mays
  Clone ID: LIB83-015-Q1-E1-H4.F2
atggcgcgctctgaaccttttccctacttgaatgatctcagcacacccaacgaattttcgtgggacaacaccttgcgacttgcgagcacatgaatcactgtgtagaaactatttacaagcagtacaaggtacatccatgactggacaatgagtgtcgattctcaatttttctcactggtaaaccatcgtatggttaccgagccagcggcgagggtcttggcgtcttgctttagagtttaggctgtctgaacccttgacaattcatgaataaaagccccataggagtttaggacatacgatctcagctctaagcttggagaaaagaaaatttcgaaaatacaccaacagggggatcgtcttcaaacacccggccttattgctgaagctcgttggtctcacttcacatggaccacttcctgtcacacctaactcaaccttgatctgtgttgagccgagtctcttctcctcccttgctgggaaccagctatgctccttacagatgaatcattcggctctgctaagggattggggacaaaaccaccatggactccaaatttctgctggctgtcccacttgtaaggact

SEQ ID NO: 16991 - DNA, 198 bp, Zea mays
  Clone ID: LIB83-015-Q1-E1-H4.R1
acaagtcaggatccagagttgttccatacagcggggaaggggatggtgactcggaagagacggctgagactgaggacgcgcccgaagaatttcagtcagctcacaaaggtgaggacttgtcgaagatcaggatgcagctcgttcagattgagaatcagcaagccagtttgcttaatcttctccagaaattcagtgggg

SEQ ID NO: 16992 - DNA, 116 bp, Zea mays
  unsure (1)..(116): unsure at all n locations; Clone ID: LIB83-015-Q1-E1-H4.R2
caagtcaggatccagagttgnnccatacagcggggaaggggatggtgactctgaagagacggctgatactgaggacgcgcccgaagaatttcaggcagctaacatagatgatgact

SEQ ID NO: 16993 - DNA, 434 bp, Zea mays
  Clone ID: LIB83-015-Q1-E1-H7
tggaactcttcaccgtttccgtgcttctaatacaattctagccacaggaggttatggcagggcatatttctcagcaacctcagcacacacttgtactggagatggcaatgctatggttgcacgtgctggtttacctcttcaggatcttgagtttgtacaattccatcctacaggcatttatggtgctggatgcctgattactgaaggttctcgtggtgaaggtggtatccttagaaatagtgaaggtgaacggttcatggaacgatatgctcctactgcaaaagatcttgcttctcgtgatgttgtttcaagatcaatgacaatggaaattagagaaggacgtggtgtagggccattgaaggatcacatttatttgcatctgaatcatctgccgcctgaggttctcaaagaacggctccctggtatttctgaaa

SEQ ID NO: 16994 - DNA, 429 bp, Zea mays
  Clone ID: LIB83-016-Q1-E1-A5
tacaactcgctcacgggcaccgaggtcgccaccgtcaccgccgtcgtgcagctcgagtcgcaggacctcgcgcagatcgcgcagcacgtccagaagatgaccggcgccaagaacgtccgcctcgagacgcagctcgaccaggcgctcatcgccggcttcaccgtgcagtacggccgcgacggctccaacttcatcgagatgagcgtccggaagcagatcgaggagatcgcgtccgagttcgagttgcccgccgtcccgctcgaagtctgaggccggcttgaggcgtccatcctcgccctcgaagctataggtcctttttctgctgcctctctccctgctcttcatctgtatcattctctggatcttgaatgcttgagtgaatggtgaataccgcatacctgtatttcaggaatcatatttgattaaatg

SEQ ID NO: 16995 - DNA, 124 bp, Zea mays
  Clone ID: LIB83-016-Q1-E1-B10
ttttttttttgtgtatccaaagcacgcacgtacttcgtcaaacagcagctgcatgttttcagctcccttgtctgtacgtacatattgattttattttacctcaattgttagagttgtttgttat

SEQ ID NO: 16996 - DNA, 164 bp, Zea mays
  Clone ID: LIB83-016-Q1-E1-B4
gggtccacgacgcgtccgaaaaaaaatcaacaaaatcatgagcaagaaaaatctgaatttaactgaaaatgaatgtatgaaaaaactgacagttgcctcacaagaagaaaaaagagaaaaaaaggtctcgaaaaaaaagtaaggaacatgtaaaagtacgtcaa

SEQ ID NO: 16997 - DNA, 432 bp, Zea mays
  Clone ID: LIB83-016-Q1-E1-C1
ttcagcgtccaaattgtgcgggtgagattggtctttctgctctacagaaagttgttgctgctgttcgaatccttgcttacggtattccggctgatgccgttgacgaatacgtacgtattggggaatctactgctcatgaggcattgaaacacttttgcacggctgtccaaaccgcgtttgctccgtattatctccgtgcagcaaatgcagaagatatcgcacgccttctccaagttggcgagtcacgtgggtttcctggtatgcttggtagtgttgattgcatgcattgggagtggcgtaactgcccaagttcatggaaggggatgtttacagggcgtggtaaacatcctaccatgatcttggaagctgttgcgtcgtatgacctgtggatatggcatgcatattttggtctgccaggtagttgcaacgaca

SEQ ID NO: 16998 - DNA, 415 bp, Zea mays
  Clone ID: LIB83-016-Q1-E1-D1
cccacgcgtccgcgaggaggagatctcgtcctccgccgaggaggaggaccagtccgacgccgccggctccgtatctggcgaggaaggggatgacgacgacgaggatgctgcggcgccgcccgcggaggaagctgagggcgaggggcagcaggaggaggaggtcgacgaggaagagatcgaagccgtcactaccggcgctggagctgaggacgaggaggacgccggtgccgttaccgccgctgaaggcgacgacgagtcccagtccaccgaggacgacgagcccgtcgcgagggacaaggacgatgacgacgagactgatgcagtggttgggaagcgagagaaagcaaggctaaaagaactccagaagatgaagaaacataaaatccaagaaatattagatactcaaaaagaaaaa

SEQ ID NO: 16999 - DNA, 432 bp, Zea mays
  Clone ID: LIB83-016-Q1-E1-E7
tagctccgaaattccaggagatgtctgagaagaacctggatgttgtgttcctgaagctcgactgcaaccaggacaacaagccgcttgcgaaggagctgggcataaaggttgtgccaacgttcaagatcctcaagggtgggaaggtcgtgaaggaggtgaccggcgccaagatcgacgagctagcgcaagccatcgacacagtcaagtcagactgacaaagaaagcaagtgatgcaactagctagtgtagacgatgaatgaatgagtccctggccggcaaggctgctagatacgtacgtacgtacgtactcatcaacaattaatgatggatgatggcaatggcaaatatacagtcaatgattcatatatgcatgcatggactgctatgctagctagcagccctttgtaaatatattgtttaaggaaatgattc

SEQ ID NO: 17000 - DNA, 434 bp, Zea mays
  Clone ID: LIB83-016-Q1-E1-G2
tactttgtgtccttgatccatctagtagtgggtgtcgtatactgcctcatcagctggagtgtcggtctccccaagcgagcgcctatcaatggcacgctcctcaagcttctctttccagtcgccctgtgccatggtattggtcacatcactagcaatgtgtccttcgctgctgttgcagtctcatttgctcacactatcaaagctctggagcccttcttcagcgcagcggctactcagtttatccttggacagcaagttcccttctctctgtggctttctcttgcccctgtggtcattggtgtttcaatggcatcccttactgagctttcattcaactggactggcttcatcaatgccatgatatcaaacatctcattcacttacaggagcatttattccaagaaagctatgactgacatggatagcaccaacgt

SEQ ID NO: 17001 - DNA, 225 bp, Zea mays
  Clone ID: LIB83-016-Q1-E1-H5
cagacgcgtgggataaaacatttataagttttaaacattcaaattgtaatctttctgaatcaatttcttttgtaatcactccgatgatgtagaagaaaatcctgatgtaacttgtaatcattttgtcataaagaatttatttccgctgcaaaaggaaatcatcagaaaaggcagcataaaaaagcaaaagaaaaaaaaaaaaaaaaaaaagagaagaataaggaa

SEQ ID NO: 17002 - DNA, 398 bp, Zea mays
  Clone ID: LIB84-027-Q1-E1-E5
cagccctgaggtctctgaatctacaaggatcatctatggaggttcagtaactgctgcgaactgcaaagagctggcagcacagcctgatgtcgatggtttccttgtgggcggtgcttctttgaagcccgagttcatcgacatcatcaacgccgccgccgtgtgaagtccgctgaagatgttccaacccttcaccctgttgcggtgatgtgctgaagacagatcagactacttttttgtttaaccgtgcagtgctatgtaagctactaactttgcgctggtgcggatgctgatttccctccccctagctttttgtgaggctactctacagcttgattcagcttgctaataatgtttgcctctggacatagcgatagtggtgtttgtgtagcccttttttt

SEQ ID NO: 17003 - DNA, 372 bp, Zea mays
  Clone ID: LIB84-024-Q1-E1-B8
cccacgcgtccgggcaagtcgtcaatgttgccaacaacctcagcaagatacttggtttcggcctgtcggaaccatgggtgcagtacctgtccacgaccaagttcgtcagagcggacagagagaagatgagggttctgtttgggttcttgggggagtgcctgaggctcgtcgtgcaagacaacgagctgggaagcttgaagcttgccctcgagggaagctacgtcgagcctggccctggcggcgacccgatccgtaacccgaaggtgctcccgacagggaagaacatccacgctctcgatccgcaggccatcccaaccacggctgccttgaagagcgccaagatcgtcgtgtaccgtctcctggagaggcaga

SEQ ID NO: 17004 - DNA, 395 bp, Zea mays
  Clone ID: LIB84-027-Q1-E1-E12
acgcgcctcatcaacgccgagatcaacaagcagctcaaccaggcggagttcgacgccctgctacaggagttcaagacagactacaaccagacccacttcgtgcgcaaccccgagttcaaggccgccgccgacaggatggagggcccgctccgccagatcttcgtagagttcctcgagcgctcctgcaccgccgagttctccggcttcctcctctacaaggagctcggccgcaggctcaagaaaaccaacccggtcgtggcggagatcttctcgctcatgtcaagggacgaggcgcgccatgctgggttcttgaacaaggggctgtctgacttcaacttggcgctggacctggggttcctgaccaacgctatgaagtacaccttcttcaagcccaa

SEQ ID NO: 17005 - DNA, 426 bp, Zea mays
  Clone ID: LIB84-003-Q1-E1-C7
aagtccaatccatttctctttctgctgcttgtgatttgttcatgcggtttgtaacgaggacctcacatctggagcatgagaagtttgatgcagcacaatcgcggctaattgagcgaggagaaaaatttggggagatatctttaaaggctcgcaagacaattgcaatgcttagtcaagattttatttatgatgggtgtactatacttgtccatgggtagtccagagtagtactggaagttctaaagcttgctgcatccaatcgcaagctcttccgggtactatgcagagagggcagggcagacagaattggtttaaggatgtcagatgaacttgcagcatgtaaggatcgctgttaagggtcgaattgatgtagctggttgcgtagtccattgatgaagttgacatggggttttgttggcgctgatg

SEQ ID NO: 17006 - DNA, 358 bp, Zea mays
  Clone ID: LIB84-017-Q1-E1-A12
atctgaaggagaaagggagagagacactcgtcccccgtaccgtggcggaggcagacgtggtggttacaggaatgttgagtttggtgatgactctgagaggccaccacggagaaactatgagcgccacagcgggactggccatggctatgagatgaagcgtgatggcgcagggcgagggaactggggcactgccactgatgaacttattgcccacgatgcataggactctccgaagatggaggaggctgctcctgttgctgacaaacaaggtgagcagaatgatgccccagcagcagatgagaacaaagataacaaggatgctactgcaaatgaggaagaagagaaggaagaggacaag

SEQ ID NO: 17007 - DNA, 304 bp, Zea mays
  Clone ID: LIB84-025-Q1-E1-F7
tactcgagaagctcaagcacaagaaaaagagactcgtccagtcgcccaactccttcttcatggatgttaagtgccaggggtgcttcagcataacgactgttttcagccactcccagactgttgttgtgtgccctggctgccaaactgtcctctgccaacccacatgaggaaaggcaaggctcactgagggctgctctttccgcaggaagggagactagaccggatgtggtcgtcaagttttgctctatgccacatactaacgtcatgaactgcctttagctaacattttccagaacttgttctc

SEQ ID NO: 17008 - DNA, 382 bp, Zea mays
  Clone ID: LIB84-008-Q1-E1-F8
ccacagcgagcgagagcaaggcgcccaagcaaccaccgcgagaacaagtcgcagccaaacagccccgtctcccagcgaagcttgagcttgcattattctaccatgtcttccatggagctgctccacgccgtcgtcccggagaagcagagcgaggaggaggtcgcgcccgcagcgacgaccacgagcagcagcgccaccgccacgggcggggacgagggcgcccacgtgctccaggggtgggccaagaggaagcgctcgcgccgccagcgatcggaggaggagaacctcgcgctctgcttcctcatgctctcccgcggtggccaccaccgcgtcaaggcgccgccaacgccggtcccgtccgcggcgccggccgccgcggagt

SEQ ID NO: 17009 - DNA, 411 bp, Zea mays
  Clone ID: LIB84-008-Q1-E1-F10
ccacagcgagcgagagcaaggcgcccaagcaaccaccgcgagaacaagtcgcagccaaacagccccgtctcccagcgaagcttgagcttgcattattctaccatgtcttccatggagctgctccacgccgtcgtcccggagaagcagagcgaggaggaggtcgcgcccgcagcgacgaccacgagcagcagcgccaccgccacgggcggggacgagggcgcccacgtgctccaggggtgggccaagaggaagcgctcgcgccgccagcgatcggaggaggagaacctcgcgctctgcttcctcatgctctcccgcggtggccaccaccgcgtccaggcgccgccaacgccggtcccgtccgcggcgccggccgccgcggagttcaggtgctccgtctgcggcaagtccttc

SEQ ID NO: 17010 - DNA, 421 bp, Zea mays
  Clone ID: LIB84-015-Q1-E1-F7
aatccgtggcgctcctcggcggcgcgcgccttcccgccgctccgcgctccgccctcctccctcggcgcagcgtctgccagcttcgcttccaagatgcaccgaggctctccctgctccgtgcgaaggccgcttccgaggacacatcggcctccggcgacgagttgatcgaggacctcaaagcgaagtgggacgccgttgaggacaagcccaccgtcctcttgtacggcggcggcgccgtcgtcgccctttggctgacgtccgtggtcgtgggcgccatcaacgccgtgccgctgctccccaagatcctggagctcgttgggctcggctacaccggctggttcgtgtaccgctaccttctcttcaaggaaagcaggaaagagttggccgccgacattgagaccttgaagaaaaaaatagctgg

SEQ ID NO: 17011 - DNA, 383 bp, Zea mays
  Clone ID: LIB84-024-Q1-E1-H7
aatcgacaagcacgcgcggacggcgctggccttcgtgacgctcaagcacgacggggagcgcgagttcatgttctacaggaacccgagcgcggacatgctgctgacggaggcggagctggacctgggcctggtgcggcgcgccagggtgttccactacggctccatctcgctcatctccgagccgtgccgctcggcgcacatggccgccatgcgcgcagccaaggcggcgggcgtgctctgctcctacgaccccaacgtgcgcctcccgctctggccgtcgcccgacgccgcacgcgagggcatcctcagcatctggaaggaggccgacttcatcaaggtcagcgacgacgaggtggccttcctcacgcgcggggacgccaacg

SEQ ID NO: 17012 - DNA, 395 bp, Zea mays
  Clone ID: LIB84-003-Q1-E1-A10
aacaaagctaggcctaacttgaaggtgggcatttgtggagaacacggtggagagccttcctctgtggccttcttcgcgaaggctgggctggattacgtttcttgctcccctttcagggttccgattgctaggctagctgcagctcaggtgcttgtctgaggctgcctcctcattggcaaccggattgcctgctgctggtggatgtggtgatcaacagtattattacagagccatgctatgtgaacattactagtagcagtgctcataaaagctacaatcccatgtcctttttttccccagtcaagttaaacttccaaaacggctccatggggtcaaaagctctgttcttcaatacatcaagcaattatcgaataatatacgttgcaaaatttttt

SEQ ID NO: 17013 - DNA, 384 bp, Zea mays
  Clone ID: LIB84-002-Q1-E1-D6
catgaactggggcatcaagtgactcttatccgacaagttgctgagaaagtgttcgccaatgtgggcaagactatccggtacaaagttggaacactgattgagatccccagggcagctctggtggctgatgagatagcggagcaggctgaattcttctccttcggaacgaacgacctgacacagatgacctttgggtacagcagggatgatgtgggaaagttcattcccgtctatcttgctcagggcattctccaacatgaccccttcgaggtcctggaccagtggggagtgcgcgagctggtgaagcttgcgacagagaggggccgctcaactacggctaacttgtaggtgcgcatttgtggaaaagacggtggagagccgtcc

SEQ ID NO: 17014 - DNA, 232 bp, Zea mays
  Clone ID: LIB84-003-Q1-E1-C2
aatcaggtgcttgtctgaggctgcctcctcattggcaaccggattgcctgctgctggtggaagtggtgatcaacagtattattacagagccatgctatgtgaacattactagtagcagtgctcataaaagctacaatcccatgtcctttttttccccagtcatgtaaaacttccaaactgctccatggttcaaaactctgttcttcaatacatcatcaattatcgattatat

SEQ ID NO: 17015 - DNA, 381 bp, Zea mays
  Clone ID: LIB84-029-Q1-E1-E6
acccacgcgtccgcgctgaatgggtcgactggtgaggtgatccttggaaagcagccgctttccccaccagcccttagtggcgatctgggaactttcatggcctgggtggatgatgttagaaagctcaaggtcctggctaacgccgatacccctgatgatgcattgactgcgcgaaacaatggggcacaaggaattggattatgccggacagagcacatgttctttgcttcagacgagaggattaaggctgtcaggcagatgattatggctcccacgcttgagctgaggcagcaggcgctcgaccgtctcttgccgtatcagaggtctgacttcgaaggcattttccgtgctatggatggactcccggtgaccatccgactc

SEQ ID NO: 17016 - DNA, 417 bp, Zea mays
  Clone ID: LIB84-004-Q1-E1-C3
gagataatggttcctcttgttggaacaccacaggaactggggcatcaagtgagtcttatccgccaagttgctgagaaagtgttcgccaatgtgggcaagactatcgggtacaaagttggaacaatgattgagatccccagggcagctctggtggctgatgagatagcggagcaggctgaattcttctccttcggaacgaacgacctgacgcagatgacctttgggtacagcacggatgatgtggggaagttcattcccgtctatcttgctcagggcatcctccaacatgaccccttcgaggtcctggaccagaggggagtgggcgagctggtgaagtttgctacagagaggggccgcaaagctatgcctaacttgaacgtgggcatttgtggagaacacggtggagagccttcctct

SEQ ID NO: 17017 - DNA, 430 bp, Zea mays
  unsure (1)..(430): unsure at all n locations; Clone ID: LIB84-013-Q1-E1-A5
gccaggttgtgttcactgctgaggatgctgaagcatggcattcccaagggaaagctgctattctggtaagggcagagaccagccctgaggacgttggtggcatgcacgcagctgtggggattcttacagagaggggtggcatgacttcccacgctgctgtggtcgcacgtgggtgggggaaatgctgcgtctcgggatgctcaggcattcgcgtaaacgatgcggagaagctcgtgacgatcggaggccatgtgctgcgcgaaggtgagtggctgtcgctgaatgggtcgactggtgaggtgatccttgggaagcagccgctttccccaccagcccttagtggtgatctgggaactttcatggcctgggtggatgatgttagaaagctcaaggtcctggctaacgccgnataccctgatgatgcattgac

SEQ ID NO: 17018 - DNA, 307 bp, Zea mays
  Clone ID: LIB84-013-Q1-E1-D8
aagtacggcgtgggcaagaggatcaggcttccctacaccagaaagatcatcgacgccatccactccggcgagctcctcaccgccaactaccagaagaccgaggtgtttggcctggagatgcccactgagatcaacggggtgccgtcggaaatcctcgacccgatcaacacctggacggacaaggtcgcgtacaaggagaatctcctgaggctcggcgggctcttcaagaagaacttcgaggtgttcgccagctacgacatcggggacgacagcagcctgactgacgagatcctcgccgcaggcccca

SEQ ID NO: 17019 - DNA, 353 bp, Zea mays
  Clone ID: LIB84-029-Q1-E1-A6
acccacgcgtccgccagggcacagcatcagtggtccttgcaggtttgttagcagcactcaagatggttggtgggaccctggcagagcagacttatttgttccttggtgctggggaggctggaactggtattgcagaacttattgctcttgagatttcgaaacagacgaatgctccaattgaagagtgccgcaagaaggtttggctggtggactcaaagggtttgattgttgactctcgtaaaggctcccttcagccattcaagaaaccttgggcgcatgagcacgagcccttgaaaaccttgtatgatgctgttcagtccatcaaacctacagttctgatcgggacatctgga

SEQ ID NO: 17020 - DNA, 383 bp, Zea mays
  Clone ID: LIB84-028-Q1-E1-H9
acgtggggagagtgtggacaacgtggtggatacttcgaaatgacaaatcttcctccaaagacagtagatgagatctacaaggttgcatcaatagtactgagtccgaatgttcccgggcaaatctttatgggagtgatggttaaccctcctaaacctggagatatctcataccccagttcactgccgaaagcaagtccatcctcgaatctttgaggaggagagcgcgcatgatgacagacggtttcaacagctgccgaaatgtggtgtgcaatttcacagaaggagctatgtactctttcccccaaatacagctgccagcaagagccatcgaggcggcaaagagagccggcaaagcagcagacgttttctactgcctcaagctc

SEQ ID NO: 17021 - DNA, 417 bp, Zea mays
  Clone ID: LIB84-004-Q1-E1-F6
agaacatctatgttgacaacaagaaatttaactctttcaagaagattgcaagatccatgggatacggcgaggatgatctccctctagtatcatttcagtctgtctccaaaggatactatggagagtgtggtaaaagaggaggttacatggagattactggcttcagtgctccggtaagagagcagatctacaaggtagcttcagtgaacctgtgctccaatatcactggtcaaatccttgcgagcctcgtcatgaatccaccaaacgttggggacgaatcatatgcttcctacaaggcacagaaagatggaatccttcagtctttagctcgccgtgcaaaggcactggaagatgcattcaacacgcttgagggattttcatgtaacaacgctgaaagagcaatgtaccttttccctc

SEQ ID NO: 17022 - DNA, 91 bp, Zea mays
  Clone ID: LIB84-014-Q1-E1-A8
cactcttgttgtcaagtccaagtggaaaatcttggcatattatacatattgtaataataaacatcgtacaatctgcatgctgttttgtaat

SEQ ID NO: 17023 - DNA, 225 bp, Zea mays
  Clone ID: LIB84-013-Q1-E1-A10
taaagtcactcgggcggacgcgtgggcgccttcaagttcgccatcgacaaggacgtcaggaacttccaggtcctcaaagagatgtacaacgagtggccattcttcagggtcaccctggacctgctggagatggttttcactagaggatagttcggcactggcagattgttcgaccatatgcctgtcgaggcatttgacataccctggaggatgccgctcacggac

SEQ ID NO: 17024 - DNA, 384 bp, Zea mays
  Clone ID: LIB84-013-Q1-E1-B8
aaaaaatccagcgggacatggcagagcgtgggcacagccttgaaagcatcaaggccagtatcgaggccaggaaaccagattttgatgcctttattgatccgcaaaagcagtatgctgatgctgtgattgaagttctgccgacccagttgattcccgacgacaacgaaggaaaggtgctgcgtgttaagctcatcatgaaagaaggggtgaagaacttcaacccggtttatctctttgacgaaggatcgaccatcagctgggtgccttgtggaagaaagctcacatgctcttaccctggcatcaaattttcctatggcccggacacttacttcggaaacgaggtatctgttctggagatggatgggcaattcgacagactagatg

SEQ ID NO: 17025 - DNA, 333 bp, Zea mays
  Clone ID: LIB84-028-Q1-E1-A11
acgcccacgcgtccgtcccgttcccgatcctcatcacctcaaccccgcgccgccccctccccaccaccctcgccatggtcagcgccgccgcctcgccgccgccgtccgggaagccgacgcaggacgagctgaagcgcttggcggcgcaccgcgcggtggagctcgtggagcccggcatgacgctgggcctgggcacgggctccacggcggcgcacgcgctggaccgcctgggcgacctcctccgcgcgggcgcgctgccgggggtggccggcgtgccgacctcgctcaagacggatgcgcaagcggcgcgcgtcggcatcccgctgctcccgc

SEQ ID NO: 17026 - DNA, 298 bp, Zea mays
  Clone ID: LIB84-013-Q1-E1-F7
gagcagagccggaaccccgagtcccgcggcgacttcaccatccttctctcccacatcgtcctcggctgcaagttcgtcgcctccgccgtcaacaaggccgggctcgcccagctgatcgggctcgccggcgagaccaacgtgcagggagaggagcagaagaagctggacgtcctgtccaacgaggtgttcgtcaaggccctcgtcagcagcggtcgcaccgtacgaatatccctccttgtccactgcgattatatattgtccgtttgagttccgagagtgttctgctttctgactcggg

SEQ ID NO: 17027 - DNA, 392 bp, Zea mays
  Clone ID: LIB84-028-Q1-E1-H5
acgcccacgcgtccggcaagcccatcacggtcgtctccagcagggacccgctcaagctcccatggggtgagctcggcattgacatcgtcatcgagggcaccggagtcttcgtcgacggccccggcgccggcaagcacatccaggccggcgcgaagaaggtgatcatcacggctcccgccaagggcgccgacatcccgacctatgtcgtcggcgtcaacgagggcgactacgaccacagcgtcgccgacatcatcagcaacgcgtcctgcacgaccaactgcctcgcgccattcgtcaagatcttggacgaggagttcggaatcgtgaaggggaccatgacgacgacgcactcgtacaccggcgaacagaggctgctggacgcgtcccaccgc

SEQ ID NO: 17028 - DNA, 413 bp, Zea mays
  Clone ID: LIB84-017-Q1-E1-D3
tggcgtcgtccatgctctccgctaccaccgtgccactccagcaggggggcggcctgtccgagttctccgggctcaggagctccgcgtcgctgcccatgcgccggaatgccacctccgacgacttcatgtccgccgtctccttcaggacccacgcggtcggcacgagcggcgggtcgcggcgggcgccgacggaggcgaagctgaaggtggccatcaacgggttcggccgcatcgggcgcaacttcctgcggtgctggcacgggcgcggcgacgcctcgcccctcgacgtcatcgccatcaacgacaccggcggtgtcaagcaggcgtcccacctgctcaagtacgactccacgctcggcatcttcgacgccgacgtcaagcccgtcggcgacaacgccatctccgtcgaccgc

SEQ ID NO: 17029 - DNA, 369 bp, Zea mays
  Clone ID: LIB84-027-Q1-E1-F5
acgagtctcgtccacccgtcatcctcctagctcctctactcgccagtcgccatgggcaagattaagatcggaatcaacggcttcggaaggatcggcaggctcgtggccagggtcgccctccagagcgaggatgtcgagctcgtcgccgtcaacgaccccttcatcaccacggactacatgacctacatgttcaagtacgacaccgtccacggccactggaagcacagcgacatcacactcaaggactccaagacccttctcttcggtgacaagccggtcaccgtctttggcatcaggaaccctgaggaaatcccgtggggtgaggctggcgccgagtatgtcgtggagtccaccggcgtcttcactgac

SEQ ID NO: 17030 - DNA, 406 bp, Zea mays
  Clone ID: LIB84-012-Q1-E12-B5
gcttggctagataggattaattagttcttggttattgattggtgaagtcttgtagttgcatatggttgttcattttctttcttaacacttgctttagacttgaatgaattaagaagggggaaacacttttgtgggtgtaaataatttagttcaagcaataggtaatccaacgatcatgatgcttgttatggtttagtagtagcttatctatgcttttgtgctcgcttttacctgtggttgcatatcaagtattattaaaatgccttgttgtctaaatatgatatattgtgttgggggccttcggcttccgaaggtcctcaaaaacatgatttaacaatgtttctggagtataatgtgtgaacaggtatcttcggacttgaatcagaaagggagaagctcacaagat

SEQ ID NO: 17031 - DNA, 87 bp, Zea mays
  Clone ID: LIB84-030-Q1-E1-C10
agcttctatcaagccgaaggtacaaatgtaattcgatattgttcatatttgttcatgataatataataaaactatcttaatgatgtc

SEQ ID NO: 17032 - DNA, 408 bp, Zea mays
  Clone ID: LIB84-008-Q1-E1-E11
cgacggccgctactggaccatgtggaagctgcccatgttcggctgcaccgacgccacgcaggtacaaggagctgcaggaggccatcgccgcgtacccggacgccttccaccgcgtcatcggcttcgacaacgtcaggcagacgcagtgcgtcagcttcatcgcctacaagccccccggcagcgagtagagaccgtggctagatcgacccatggccatgcctctgcctgttgatcggatcaccttcttgcattggttcctctctctctctccctccttttttttccctttatctcatcatttcttttctcctgcatgcaatggttccttttgcttccaacaattctcctgctgatgtatccagcatggcatcatccatctacaattacgtacgtagtgcaacgactgtc

SEQ ID NO: 17033 - DNA, 367 bp, Zea mays
  Clone ID: LIB84-017-Q1-E1-D1
cccacacgtccggctcgatctactactactactagctggcacacatactagccagcctgccagccagcttgccatggcgcccaccgtgatgatggcctcgtcggcaaccgccgtcgccccgttccagcgtctcaagtctgccgccagcctctccgtcgcccgccgcagcaccaggagcctcggcaacgtcagcaacggcggaaggatccggtgcatgcaggtgttgccggcctacagcaacaagaacttcgagacgctgtcgtgcctgccgccgctgtcgacggacgacctgctgaagcaagtgggctacctgctgcgcaacggctggatagcctgcctcgagttcagcaacctcgggttcctgtag

SEQ ID NO: 17034 - DNA, 427 bp, Zea mays
  Clone ID: LIB84-008-Q1-E1-G1
cttccaccgcgtcatcggcttcgacaacatcaagcagacgcagtgcgtcagcttcatcgcctacaagcccccgggcagcgactagatcgcgcccgccggccgccccccgccggctagctagctagctagctcctgcgtgagctagtagctagtgccatgcgtcgtctctgtcgttcggttttgcttcgggtcaccgtgtaccctttgcttgcttggtttcttctttcctttgttccttttattttcatcatttccccggccatgggtcctttgctttccatcagttctctgctggatgtgatgtatccattgttgcaatcatggccttgcattggctacctctatacgtgctacatggctactgcaacgcctatatatacttggggtgaggaacatgtgaatgcaagctccggctatcatatacatg

SEQ ID NO: 17035 - DNA, 415 bp, Zea mays
  Clone ID: LIB84-015-Q1-E1-E1
ggcccggctcgatctaatactactactagctggtacacatactagccagcctgccagccagcttgccatggcgcccaccgtgatgatggcctcgtcggcaaccgccgtcgccccgttccagggtctcaagtccgccgccagcctccccgtcgcccgccgcagcaccaggagcctcggcaacgtcagcaacggcggaaggatccggtgcatgcaggtgtggccggcctacggcaacaagaagttcgagacgctgtcgtacctgccgccgctgtcgacggacgacctgctgaagcaggtggactacctgctgcgcaacggctggataccctgcctcgagttcagcaagctcgggttcgtgtaccgcgagaactccagctccccgtgcgactacgacgggcgctactggaccaggtgg

SEQ ID NO: 17036 - DNA, 303 bp, Zea mays
  Clone ID: LIB84-015-Q1-E1-B4
cactttctttaggatttttttttctatgggtatcctgattgtaaaaggcatccagtcgctttgagaccaacaatatttgatcgccttccagaattcagaacctgcggctaattcaccacgccatttgcaagctgctttgataatttcagtaccttcacgagcaagatctcgcccttcgttacgagcttgtacacaggcgtcgaacgccacacgattagctgctgcaccaggtgcatttccccaaggatgtccgaaagttccgccaccaaattgtaatacggaatcatctccaaagatttcggt

SEQ ID NO: 17037 - DNA, 330 bp, Zea mays
  Clone ID: LIB84-004-Q1-E1-A2
cggacacttgggcggaagcgtgggctgccgcgcaacggctggatatcctgcgacgagttcagcaaggtcggcttcgtataccgcgagaactccagctccccgtgccactacgaatgccgctacaggaccatgttgaagctgccgatgttctgctgcatctacgccacccaggtgtcaacggatctgcacgatgccatcaaatcctacccggacgccttccacggcgtcagctgattctacaacatcaagcacacgcacttcgtcagcttcatcacctacaagccccctggcagctgactcatcgctcccggcgtgccgaccacgccggtt

SEQ ID NO: 17038 - DNA, 385 bp, Zea mays
  Clone ID: LIB84-014-Q1-E1-D4
agaccatcccatgcagatgcaacctatgacttcaagtatggagttagagctgtgcagggaggtggaaggtcatcagccagagaaaccattggcagggtggctgcaggagctcttgcaaagaaaattctaaagctcaaatcacgagtggagatcttggcatttgtttctaaagtgcaccaagtcgtacttccagaagatgcagttgattatgagactgtaaccttggaacatatagagagcaacatccttagatgtcctgatccagaatatgcagagaagatgattgctgccattgataccgtacgagttagaggagattcaattggtggggtcgtcacatgcattggaagaaatgttcctcgtggtcgtggatcccctgtttttg

SEQ ID NO: 17039 - DNA, 206 bp, Zea mays
  unsure (1)..(206): unsure at all n locations; Clone ID: LIB84-001-Q1-E1-A1
cccacgcgtccgaccggccccactcgcgtggttcctcatggagagccccaccctctggctcccaccgctcgtcctcctccgctggccgccgccgccgctctccggcccactcgccgcactccccgccgcgctctacgcgttccactacgtcnagcgcacgctggtcaaccggctcggcctcgccggcctgcgcggcgccccggccc

SEQ ID NO: 17040 - DNA, 347 bp, Zea mays
  Clone ID: LIB84-001-Q1-E1-A2
aacagcgtcaggtcagccgccgccgcgtccgcctcgcccagcgcagcagccgccgcagcacatcgctatctcgatctcaggcatggcggaggtggcgcagcaacaggacacgccgaagctgttcaaccgctggaccttcaatgatgtccaggtgaacgacatctcgctgaacgactacctcgctgtgaacgcgacgaagcacgcgatgtacctgccgcacaccgcggggcgttactccaacaagcggttccgcaaggcgcagtgctcgatcgtcgagcgcgtcacaaactccctcatgatgcacgggtccatcaacggaaagaacgtcatggctgtccgcatcatca

SEQ ID NO: 17041 - DNA, 286 bp, Zea mays
  Clone ID: LIB84-001-Q1-E1-A3
cccacggcctccgaacacgcgtcaggcgagcggtcgcccttttttttttttttttttttttttttggcaagaaaagtaataactatacgattttgggaacgaaagcaaaatacgaacgagcttctgacgctactactcaagatagataacggttctacacatgttaccatcacaagttcatcaatatgactccaaggtggtaggtaagtctaaggggcaactttgttacactcacgaagcagtggaaaactatacaaaattactgccccggtatcacacgtcctca

SEQ ID NO: 17042 - DNA, 390 bp, Zea mays
  Clone ID: LIB84-001-Q1-E1-A4
actagttctagatcgcgagcggccgcccgcgatcttaggaacgccgagggtcgccgccggtagaagaacagcttcggaagctggtcggtcgggacggtgcgtcgtcgcggtgtccgcgtcctcgtccccggccacggccgcggtggcgacggaggtgcccggggtgatgaaggcctgggtgtaccacgcgtacggggacgccggcgtgctcaagctcgacgaggccgcggctgtgccggccgtgggcgaggaccaggtgctcgtcaaggtcgtcgccgcggcgctcaaccccgtcgatgccaagcggcggggccgcaaagtccaggccaccgactcccctctcgcgaacgtgccggggtacgacttgtccggcgtcgtcgtcaaggtggg

SEQ ID NO: 17043 - DNA, 418 bp, Zea mays
  Clone ID: LIB84-001-Q1-E1-A5
accggtggcgggttgacatatgcaagggttaagtgctacatatgtcgtgtgattggagatcctcagctgagtataatcgattcggatcgccgtaccttcgcggttatgaagacttggtcacttccctgcaacctaaagtcaggatgtgaacacgatggataaaaatgatgttgtattgatgagatgatgaaattagactagatgcaaacaatgtctattaatattcaatctggcgttaaaatattgaaagtaaggactcactttagtaagctatttctgcaaaagtatctaagttgattcttgctaaagcctctccttgattcctatttatccagcatacccttgagagtcttttccttagtcgggtaagacttgctgagtaattccatactcagggttttattccctgttgtttttc

SEQ ID NO: 17044 - DNA, 419 bp, Zea mays
  Clone ID: LIB84-001-Q1-E1-A7
tgatcctgagatgaagcaacactcgtttctttttgaaattggttacccggaaatcgaagataattgcaagccaaggcaccgtttcatgtcatcatatgaacagaaagtccaaagttgggataagggttatcagtacctactttttgctgcagagccctatgaaattattgcattcaagataccaagtacagagattgataaatcagcgaacaaattcttctcttactgggatcctgacaagaaggaatatctactgcaactgtacttcaagccaagaccgccagaagctaataaaccaccaccagctcctccggggactttgcctaatgggactggggttcctgttgctccaacaaggccaccggcgcaagcccctccacccctgcgacaagttccaccgccccccgcctcatgcagct

SEQ ID NO: 17045 - DNA, 418 bp, Zea mays
  Clone ID: LIB84-001-Q1-E1-A8
agcaggcagcgagtgcaaacaaccgcgagagcgatcagcgatgggctccttcttctcgaccttagtgacgccccctccgcccgccgccgacgacccgaactgcgccgtggtggccgcgcactccaaggccacctacgacgagcagtgggcggcccacaagagcagcagcaagctgatggtgatcgacttctcggcgtcctggtgcgggccctgccgcttcatcgagccggccttcaaggagctggcctcccgcttcaccgatgccatcttcatcaaggtcgacgtcgacgagctcgcggaggtcgcaaggacatggaaggtacaggcgatgccaacgttcgtgctggtcaaggatgggaaggacgtacgccgtgtgattgggggcaagaacgacgagcttgagaggaagatcaggatg

SEQ ID NO: 17046 - DNA, 412 bp, Zea mays
  Clone ID: LIB84-001-Q1-E1-B10
atagccgcacgcatggcgaaccgaagcgaagccaaaacgcccattccccttcgccctcttcgaccctagcaagaagacggcggcggagatggtgtactacgcgcttttggtgggcgcagagctggacggcctcaccaacctgcagcccagcggcggctgcgacgaccccagcttcccctactacctcaagctcaagtgcgagaactgcggggaggtcaccgccaagtccacctacgtcactctcagcgagcaagtcgacctgcccaagggacatggcaccgctcacctcgtccagaagtgcaagctttgtgggagagatggaacaattgtgatgattcctggtcaggggacgccacttactattgagcagagccaggaagaagagaagacttgtttgatggtgtttgactgc

SEQ ID NO: 17047 - DNA, 336 bp, Zea mays
  Clone ID: LIB84-001-Q1-E1-B11
cggacgcgtgggcgctgtaccacccccgcagggcggcggcctcctgcccgctcgccgtcgccgccgctccctcgtcgagaaaagcgttcttgacgtgcccgctgctgggccactggaccacggccgcgccgccgcgcgccatcccctcctcgtcgtcgtcgtccccggcgctcatcgcgtccgtgcaggacctgtacgacttcatctgctgcggcccgctggtggacaggatcggctacaccagtgagaagatcgccgagtccatcgaccgctggcttctcgccggggctccggtggcgcgcctcttccgcctcaacgagctccagctgtcggacg

SEQ ID NO: 17048 - DNA, 380 bp, Zea mays
  Clone ID: LIB84-001-Q1-E1-B12
cccacgcgtccggcaggcggtggaggagtggtaccggcagatgcccatcatcacgcgctcctacctcaccgccgctgtcgtcaccaccgtcggctgcaccctcgaaatcatttcgccgtatcacctgtaccttaacccgaagctcgtggtgcagcactacgagatttggcgcctcgtcaccaacttcctctacttccgcaagatggatttggattttctattccacatgttctttcttgcacgatactgcaagcttctggaggaaaactcatttagaggaagaactgctgactttttttacatgctcttgtttggtgctactgtcctaactggcattgttctgatcggagggatgataccttacatttctgagacatttg

SEQ ID NO: 17049 - DNA, 261 bp, Zea mays
  Clone ID: LIB84-001-Q1-E1-B2
agttaacggtgtcattctattgtgagtcccgttgtgataaatttggacaagtatatatatgtcggttataattcgtatgaatggttagcttgtttatgttgggtccgaggaatgtaatcgatggttcaccgttcctctggaaaatgttgtgtttgcaatttagagagtattgttgcaatgactattatgtttgacaacagaatactcagaaagtattgttgcaactccaaaaaaaagaagaagaaaagggagagcgggcag

SEQ ID NO: 17050 - DNA, 419 bp, Zea mays
  Clone ID: LIB84-001-Q1-E1-B3
atgcattggaggagtggatgcaaaagttactttctgacattgacttgtcaagaagtgctcctgttgctgctttttttgagcttgaagctgctgcacgttcatatttccaagaacggaatgggcgtccttctgaacagtctgacaggagcaactggtaatggtgtgcttggagaagctatcttagatcagtccgatgagcttgttagtaatgccttgaatcacaggaaacggaaccttgtattggaacatgatggtaggaatggttcagtagcgtcttataggggagttgtttcagatgaggaccgtgtaactaatcccgggcatgctaggaaagactctgctgaaagtatttggagtgatttgagttctttaagaggaagtgaattatctattccaggggttagtagtttcctttggga

SEQ ID NO: 17051 - DNA, 389 bp, Zea mays
  Clone ID: LIB84-001-Q1-E1-B7
accacgcgtccgcccacgcgtccgcgccgcaccagcgccagcccgcgccgtggtcagaaggaggtccttcaccgtgcgcgcctctctccgcaaggccaccggcaccgccgccgtggcaatggctgccagcgccctgcttgccggcggtgccatggcccacgaggtgctgctgggcgcaggcgacggcgggctcgtcttcgagcccagccagttcaccgtcaaggccggcgacaccatcacattcaagaacaacgccggcttcgcgcacaacgtcgtcttcgacgaagaccaggtgccgagcggggtcgacgccaccaagatctcgcatgaggagtacctcaacgcgccaggcgagacctactccgtcaccctcaccgtgccgggaacct

SEQ ID NO: 17052 - DNA, 382 bp, Zea mays
  Clone ID: LIB84-001-Q1-E1-B8
accacgcgtccgcccacgcgtccgggctagaaaagcataattattataattagtcatatatcactagttagtatctgcttaatgctttgttataagtgtttcgtcatcttcaacgtagattaattgttttataagattcctctatatattcatacatgtgcattgtgcatcccatgaggtacgataattaatcgcgtgatgcggaagacgagccaagtcgagcccaagcgcgggttactacgcatggtaatgctgatggaagaacctccctcatcaggtgctaggacaaggatactcgtcaagtggtcatcgtctaacaacactaacctagtgttatccaggttacgagtcacttgattgtgattggtgttaaacgctggtg

SEQ ID NO: 17053 - DNA, 295 bp, Zea mays
  Clone ID: LIB84-001-Q1-E1-B9
aaagaagaaggacggtggcggcggcggcggggccgatgagaagaaggatatggataatgagaaggataataaagcggacggcggcgataataaggcggacaatgagaatggcggcggcggctcctgcgtgatagatgaaggccgacaatgaaaaaggcagcggctagaagaatgccgacaaggataatggctgcggcgagaataatgcctgacaatgagaatggtgccgacaagcccattgaggataatgaataagcccaatgacgagactgttacgctgaagattcggctgcac

SEQ ID NO: 17054 - DNA, 402 bp, Zea mays
  unsure (1)..(402): unsure at all n locations; Clone ID: LIB84-001-Q1-E1-C1
cggacgcgtgggcggacgcgtgggtttttttttttttttttttagataacggttctacacatgttaccatcacaagttcatcaatatgactccaaggtggtaggtaagtctagggggcaactttgttacactcacgaaccaatggaaaactatacaaaattactgccccggtatcacacgtcctcatggtctttattgttgtcaaagttgcattaggggcaacgccatcacggcaccaaaaactgaaaacatgaccagcaccatccagaagggcaccgccttcttctggttcttgtcacggcgtacctcagccagtggttgcgccctattggcgacgaccggagcttgctggacagcaagggatggaacangtgcaggattctcctgtggcaccggctctgc

SEQ ID NO: 17055 - DNA, 389 bp, Zea mays
  Clone ID: LIB84-001-Q1-E1-C11
tcgcgggtcgacacacgcctctagttgtcgtcatgcaataaatatgatgaggaaccaacctcgaggtggtcacatattcaaccttgatggtgctggttctgatggaaggccaactccaagatttgctgcatatggtgcaacaaagagaagtgttgtgcatcttacgaagtcacttcacgctgaattgcagatgaatgaagtgaataatgtgatggtgcacaatctatcgcctggcatggtcacaacagatcttcttatgtctggtgcaactacaaaacaagcaaaatttttcatcaatatattagctgaacctcctgatgtggttgcagactaacttgttccgaacgtcagagaaatccctaccaggcaatccatgaagccaacctaga

SEQ ID NO: 17056 - DNA, 437 bp, Zea mays
  unsure (1)..(437): unsure at all n locations; Clone ID: LIB84-001-Q1-E1-C2
ctcgcgagtcgacacaacaccctaaactgactcgtactacttgcacggtagctgccccgtcatcgaaggccagaagtggtccgcgactaaatggatccatgtgaggtcatttgacctcaccgtcaagcagccgggtccctctgatggatgtgaggacgacaatgtcctctgcccccagtgggcggccgtgggcgagtgcgccaagaaccctaactacatggtggggaccaaggaagcacctggcttctgccggaagagctgcaaagtatgcgcagagtaagcaaccattgggatattcttggccggcgccggcggcctgtgggtggcgacgattccgtcgttgacgttgcctgcaagtgccctgtacttgtcnctcctggtgagaggcttgtgcactcgtacgagagcgtttcggtatccaccggcggagagggatt

SEQ ID NO: 17057 - DNA, 156 bp, Zea mays
  Clone ID: LIB84-001-Q1-E1-C3
aacacgcgtcagaatgtgttcacggacctgtaatgcttgctccttgtcatatgaccttgctctaaacatttgtgatgaagctgtcaaggtaatatattttctctaaatatttagcctaaaaaaaaaaaaaaaaaaagggcgagttctagatcgcga

SEQ ID NO: 17058 - DNA, 424 bp, Zea mays
  Clone ID: LIB84-001-Q1-E1-C4
ggactcgcctccacggctccaccatgtatcccaaggcggcagacgaaggtgcgcagccgctggccacgggcatccccttcagcggcggcggcggctactaccaggcgggcggcgcgatggcggcggcgttcgcggtgcaggcgcaggcgcccgtcgccgcctggtccaccgggctctgcaactgcttcgacgactgccacaactgctgcgtgacgtgcgtgtgcccgtgcatcacgttcgggcagaccgcggagatcatcgaccggggctccacgtcctgcggcaccagcggggcgctgtacgcgctcgtcatgctgctcaccggctgtcagtgcgtctactcctgcttctaccgcgccaagatgcgcgcgcagtacggcctccaggtgagcccctgctccgactgctgcgtgcactgctgctg

SEQ ID NO: 17059 - DNA, 425 bp, Zea mays
  Clone ID: LIB84-001-Q1-E1-C5
agccgcgtcccagtgcgaagagaccacgactcagatggccagccgctgggtccggcccgaggtgtacccgctgttcgcggcaacgggcgtggccgtcggcatctgcggatttcagctcttccggaacatcaccggcaacccggaagtcagggtaaacaaggcagggagggcagctggtgtgcttgagaaccatgaggaggggaggcgttacgccatgcatggcctaagaagctttgtgcacgacaagactcctgagatcatgcctgcagttaacaagttcttcactgaccctaagtgaagcatgttgattggcatactactactactacttgctactggggattttacactttgctggcaactcaatatgttggggacatccctgacctctaaaagtacttttgagtgcttggtgatgacctgct

SEQ ID NO: 17060 - DNA, 416 bp, Zea mays
  Clone ID: LIB84-001-Q1-E1-C6
accacgcgtccgcccacgcgtccgcccacgcgtccggttagcaggatagagagggagaggagcagaagagagcagagggccagaggcgcagaaggcagtcgcggacaggaggaagaggaagaagaagcggcagcgagcgaggatgccgtgcctgaacgtgtcgaccaacgtgaacctggagggggtggacacctccgccatcctcgccgaagcctccaagtccgtcgccaacatcatcggcaagcccgaggcctacgtgatggttgttctcaagggttcggtgcctatggcatttggaggtacccaggagccagcagcttacggtgagctggtttccatcggaggcctgaaccctgatgtgaacaagaagcttagtgctgggatcgcttctatcctggagtcaaagctgtcggttc

SEQ ID NO: 17061 - DNA, 373 bp, Zea mays
  Clone ID: LIB84-001-Q1-E1-C9
accacgcgtccgcccacgcgtccggcaacgacctcaagttccccaacttcggcatcaagacggccgccaacgccaagatgtggagcgagtccggcacgttcatcgggtacgtggccgtgtccaccgacgaggagacggcgcggctcggccgccgggacatcgccgtggcgtggcgcggcaccatcacccgcctcgagtgggtggccgatctgacggccaaccagatccccctgcgcgagacgggcgtcccctgcccggaccccgacgtgaaggtggagcgagggttcgcggcgctgtacacggacaagggcgccggctgccgcttctgccggtactcggcgcgggagcaggtgctggccgaggtgcgcaagct

SEQ ID NO: 17062 - DNA, 429 bp, Zea mays
  Clone ID: LIB84-001-Q1-E1-D1
ctggatcaacagctgttggcaaaaaactgatggctgaatctgcaaatactgtgaaaaaggtctctttggaacttggtgggaatgcaccttgcattgtttttgatgatgcagacattgatgttgctgttaaaggcagtcttgctgccaagttccgtaacagtggacagacatgtgtttgtgcaaacaggatattggtgcaagaaggtatctacgaaaagtttgcatctgcattcatcaaggctgttcagagtttgaaggttgggaatgggctagaagagagtacatctcagggtcctctgattaacgaagctgctgttcaaaaggtggagaagttcataaatgacgcgacttcaaagggagcaaatgtcatgctaggtggtagaagacacagcctggggatgtcattttatgaaccaactgtagtaagga

SEQ ID NO: 17063 - DNA, 418 bp, Zea mays
  unsure (1)..(418): unsure at all n locations; Clone ID: LIB84-001-Q1-E1-D10
gggaaactctggttcggatcaccggtggcatgaaggtgaaggctgaccgtgacgagtcgtcaccttacgctgctatgcttgctgctcaagacgtcgcacagcgctgcaaggagcttggcattactgcactgcacattaagcttcgcgccaccggaggcaacaagaccaagacccctggacctggtgcccagtctgccctcagggcgcttgctcgttccgggatgaaaatcggacgcattgaggacgttaccccggtccccactgacagcactcgcagaaagggcggtaggaggggaaggaggctgtangcgtctcgtctgcgtggcatttgccggctcttggccggtggccattatgaagctagccctctctgggtggtgttgctgttctgtgtttgtcaagaccagctttaattttg

SEQ ID NO: 17064 - DNA, 393 bp, Zea mays
  Clone ID: LIB84-001-Q1-E1-D11
cggacgcgtgggcggcgccttcccctcgggtcgtttcgtgcgcccgtcgccgcccagacccagacccagaccctgcccacgcgcggctcctccccctcctcctcgctctctgccccgtggccgcgtttcggggcaacgccgtccccgacgtcccgctgctcaccttccaggacgacctcctccggcttgctcctatcgagttcgtcgccggccccgtcgtcggcgagatggttgtcgaggatgtggccgttgactgcagccctagtcgtccagctgaactgcgccgcaggctgcggttcaagcgcatgccctgccttgtgcagacccaggtgcgcctgcgtcagtcacacgcgtcgccgtcgctgtcgctggaagcactgggaggctcatcag

SEQ ID NO: 17065 - DNA, 425 bp, Zea mays
  Clone ID: LIB84-001-Q1-E1-D4
accacgcgtccgtggaattctattaagatattatatgaaagtcgaatttcttccattctcatttgagaatgcgaatacaaggaggtattttgtgtttgggaaagtccgaagaaaaaaggatttggaatctaccttttcttttgctttttcccttataaaaataactcaatcaaaatccaattatctactctacaagaatgaaatgcttgttatgcctaatatacttagtttaacctgtatctgttttaattctgttctttgtccgactagctttttcttcgccaaattacccgaagcttatgccattttcaacccaatcgtggatgttatgcctgtcatacctgtactcttttttctattagcgtttgtttggcaagctgctgtaagttttcgatgaaatctttactattctgcctggcaaattg

SEQ ID NO: 17066 - DNA, 425 bp, Zea mays
  Clone ID: LIB84-001-Q1-E1-D5
agagaggagaggaagcagcaagaggagccgaggaagaatatatccatccacccacccacacaccagacacacataccttattctccgccgtttcttggcctccggaaatctcctcccccaagttgcaagcatgggcgggttcagcctcagcggcgctacaggtctcgcggcgtgccgcgaggaagaagacgaggagctgttcgagacgtcgtcttcgatctccggcgactccgacgacgagggccaccagctctccgatggagaggggggcgcctatgatttgtcatctgtgatggcacagctccctgtcaagaaagggctatccagatactacgacggcaagtcccagtccttcgcgtgcatgtctgaagtgcgatgcctgaaagatctgcccaagaaagagacgccctacaagaagatcaaga

SEQ ID NO: 17067 - DNA, 426 bp, Zea mays
  Clone ID: LIB84-001-Q1-E1-D6
tgttcagtggagaattagcccgtgctatgcttattcagattcaaaagcttaaactggaccttgaatcgggactactggaaatggatcagattctaagggcaaatgctataaactttgctgttcttgcagcgcttcctgcttttggtctttcacttctgttgcttgtgttactgcgagcatgggttcagcgtgaccatggtgctgagggaagaggtaatattgcacgatgtcaacggaggctgcttcttgttgatgtagagagaaggcttatggagtttcaacattacagggataatggaatggaggaagaggcacggtgcaagtttggcttagtactttacacgcttgatagactctgcaaagctgttgagtcacacgcaaaagaaacaggcgaatggttaagcttgagacaagatatttttgatc

SEQ ID NO: 17068 - DNA, 381 bp, Zea mays
  Clone ID: LIB84-001-Q1-E1-D7
tctagatcgcgagcggcccccctttttttttttttttttttagcaccataacacttagtttattttagagtcatgtagaagagatacaatagccttattacaatgtgccataaaggtttagtagcaaggagccattgttggcgtgtgcataaacacaaatattctcctcgggtgactgatgacacaaagacacattgttgacacataggccccgtctggtttattatcccgacacggcaatttaaagagtccagacggcagtagtttgcacaatggccgatgcagaggaggtttacagcacaaaggccttgcggtagatgtcgaacttctccgaggaggacaggttgggttcctccacgccgctgaagttggcgaccttgc

SEQ ID NO: 17069 - DNA, 273 bp, Zea mays
  Clone ID: LIB84-001-Q1-E1-D8
tgtagatcgcgagcggccccccttttattcttattttttttcgcacgatgacactgagtatatttcacaggcatgtggaagagatcccctagccttacgacagggtgccacagaggattagtagcagtgtcccaatgtcggcgtgtgcagcaacacacgtagtctcctcgggtgtcagagtccacaacgagacattgctgacatataagccccgtctggtttatgatcccgacgcggggattgactgcgtccaggctgccagtactttgccgc

SEQ ID NO: 17070 - DNA, 406 bp, Zea mays
  Clone ID: LIB84-001-Q1-E1-D9
cggacgcgtggggccgcaagctccatcttcctccctgctgcagctcccgagcgccctgccctttgctccagcttgccgcgtgctctagcgtctgtgccgtggagcccctggcgcgggttcttctgcgcccggccatcctctctctccatcaccatggagcttcttttctccagccgcgccctgctcggttccatggccaacgttccccaagctcctccctccagtccagctgcggtgctccctgcgcgcctgctcccgcgcgcgttcctctgctcgtcgcgcccagcgagtctccatggtcaagcacgcgcggatctcctctgagctcgcccccggcctctactccttccagccggtcgagtctcgactgcgctcggcctccagctctgttttcgcgcagctcgtc

SEQ ID NO: 17071 - DNA, 429 bp, Zea mays
  Clone ID: LIB84-001-Q1-E1-E1
accacgcgtccgcggacgcgtgggcggctactccttccctctccccccttctccccctccgtcttcttcccccaggggcatccgtgttttcactttttgctcccccacgttgaaccttgatcctcgtgctccctttcttgattctttctccgtaggatctcttgctaggagtagcctgccccgtgtgcgcgctcgcacggacatgcttgtttccgcgtcttgaaaggcgagaaaaagtggagatgggcgcttgcgcttcggtacacaaggacccggggcaccccaagaagcagtttcttgactctcccaccaaggcgaaggccgccaacgggaagggtggcgggggcggcggtgttgctccggttggtgatggcttcggtgatctcaagtccaaggtcgacgctgaggctgagcagctgcgggcaaagt

SEQ ID NO: 17072 - DNA, 345 bp, Zea mays
  Clone ID: LIB84-001-Q1-E1-E2
cggacgcgtgggcggtgctccccgtgccggtgtggctgctgagcagggcgttcccggagaagaagtggatcgcgctcatcaacgtgcccgtcatctcgtacgggttcgccgggatgccgccggccacgcccaccaacatcgccacctggctggtgacgggcaccatcttcaactacttcgtcttcaggtaccgcaaggggtggtggcagaagtacaactacgtgctctcggcggcgctcgacgccggcaccgccttcatggaggtgctcatctttttcgccctccagaacgcgcaccacgagctcaagtgggtgggcacggaggtggatcactgcccactcgcct

SEQ ID NO: 17073 - DNA, 415 bp, Zea mays
  Clone ID: LIB84-001-Q1-E1-E4
caataaccactgcaagggtgaagttgttctggtgttccagccagtgttaatcctctcccttactgcagagttaagttgttcctgagctgagtgtcaacctcctgtgtggtgaccagggtcatccaagtgcccacctcgccgcggtcaagcaatcacaagcgattccccagctgtacagtgcatgtttcgtgttctccttagaacacctagacgaggtggtatttgaagaagtctactccaatgcctgctcctcaagtggatgaagccatctaactgggtattggatagagggatctagaaccacttcactgcagcagagaacacctagacgacgtggtatttgaagaagtctactcgaatgcctgctcctcaagtggatgaagccatctaactgggtattggatagagggatcta

SEQ ID NO: 17074 - DNA, 378 bp, Zea mays
  Clone ID: LIB84-001-Q1-E1-E5
acggtcgcatacaaccacggtcttaagcttcgtctgcaccaacgcatgcatagatcgatcgaactcacgggtcaggctgaacaaaaaatacagtagctaggaataatcgacggatgagttcagagcgagaggccggagtcgtcgtcctcgtcgagcgtggaggtgtagacggtgtagagggaccagatgaggccgaagacgcccagcaggatccaccccagcaggttgttgctgagccccaggctgagcccggtgccctccgtcgacatccgctcgtccaccagcgccagcgcgggcgacgtggtcaccgcgctggtggccacggccagaagcgacgacgatgcgccgttgttgccgtcgcgccgctggctcggccgc

SEQ ID NO: 17075 - DNA, 380 bp, Zea mays
  Clone ID: LIB84-001-Q1-E1-E7
cactcctcgccatcacatagaaccagtgcaagcagaagcagcgcaatggcgagcagcaccatggccctctcctccacagccttcgccggcaaggcagtgaacgtgccgtcgtctctcttcggcgaggcccgcgtgacgatgcgcaagacggcggcgaaggcaaagccggcggcgagctccggcagcccgtggtacggccccgaccgcgtgctctacctgggcccgctgtccggcgcgcccccgagctacctgacgggcgagttcccgggcgactacggctgggacaccgcggggctgtcggcggacccggatacgttcgccaagaaccgggagctggaggtcatccacgcccgctgggccatgctgggcgcgttgggctg

SEQ ID NO: 17076 - DNA, 359 bp, Zea mays
  Clone ID: LIB84-001-Q1-E1-E9
gcctcacctcagatcacctcgccgactagggctgtgtaccgccgtggatcgcgccgtccccgccatggacgtctcacactcgggatcctcagtcgccggcgaggctccgacgacaggagagcaccaggtggggactaccatcgtcagggtctgctaccagggctgcgtcgtcctgcgcgccgaatccatgagcagactggaatgtatgtagccaaccgtgcttcacacaagattactcaactggcagagaacgtgtgattctgtcactctggatctgctgcggatacacatctcatttcggattatgtacgctatttcctcgaccaacacacaatccatcttggccaaccagctaccgt

SEQ ID NO: 17077 - DNA, 363 bp, Zea mays
  unsure (1)..(363): unsure at all n locations; Clone ID: LIB84-001-Q1-E1-F1
gaaaatatcataagaatccagaggcgactccaggtttgtcggcgatgctgcgagcgggaggcangcggctcctcgccccggggctccgtcggctcggcctgggcacaggcgcctccggcgaggcgggtcctgccgcggcggcggcgggggtgagggcgtaccacgagcgggtggtggaccactacaacaacccgcggaacgtaggttccttcgacaaggacgaccccaacgtctgcactgggttggtctgcgcgccagcctgcggcgacgtcatgaagctgcagatccgcgtcgacgagaactccggcaagatcgtcgacgcctgcttcaagacgtttggctgcggctccgccatagcgtcct

SEQ ID NO: 17078 - DNA, 403 bp, Zea mays
  Clone ID: LIB84-001-Q1-E1-F10
cccacgcgtccgctcaaagactatgtctggaagacactaaagagtggaaaggttgttcctgggtttggtcatggagttctgcgtaagaccgacccacggtattcatgtcaaagggagtttgccctgaagcatttgcccaaggatccacttttccaattggtgtccaagttgtatgaagttgtacctcctatcctcactgagctgggcaaggtcaagaacccatggccaaatgttgatgctcacagtggagttttgctgaaccactttggactatctgaagcacggtattacactgtcttgttcggtgtttcaagaagcatggggataggatctcagctcatctgggaccgtgcccttggcctgccacttgagaggccgaagagtgttaccatggagttgctgg

SEQ ID NO: 17079 - DNA, 415 bp, Zea mays
  Clone ID: LIB84-001-Q1-E1-F12
agctgacggacgactgaaccaccgacagacaacatggccgcctccgcctccaccgtctccggcctcgccggcgcctccctggccagccgcccggcgttctccaccagcttcacgcggggcagccgggtgtcggcgaggaaccccctgatgagcaggaacctggagaggaatggcaggatcacctgcatgacgtttccccgggactggctgcggagggacctgagcgtcatcggcttcgggctcatcggctggatggggccgtccagcgtcccggccatcaacggcaacagcctcacggggctcttcttctccagcatcggccaggagctggcccacttccccacgcccccgcccgtcacctcccagttctggctgtggctaatgacgtggcacctgggcctgttcatcgtgctca

SEQ ID NO: 17080 - DNA, 326 bp, Zea mays
  Clone ID: LIB84-001-Q1-E1-F2
gtccccgtcaacttccaaccccagtgtggaagtgggcagctatgtgaataccaatgatgttttcaaggagcccaatgatgtcttcaaggagcctggcagcaataagcgtttgaggtcaggatgcaatgatgtgcatgtgccaacatctaaagcttctagggaaaaaatgaggatgaacaagctgaatgacaggtttcttgaattggggtctacattagaaccagggaagccagtaaaagctgacaaagctgctatcctaagtgatgctactcgcatggttattcagcttcgttcagaaacacagcagctgaaggaaactaatggta

SEQ ID NO: 17081 - DNA, 414 bp, Zea mays
  Clone ID: LIB84-001-Q1-E1-F3
cccacgcgtccgtcaaaaagcaattaactaaggaggagaagtttgaaaagaggaagcagagacttgctgcaatcggagaggatcttttggcgattgctgctgatcaaccatttcgcttccctgccacatttacatttgtggtcagagcattctcagttctagatggtattgggaaaggccttgatcctaggtttgatattacagagattgctaagccatatgccaaggaattgctaagatttaatgacgctggtgttgaaatagttgtgaaggatgcaaagaagagatgggaaaggcagtcccgtgccttttacaatttgttccgccaacccgatagagttgaaaagctcgcacaaattattgaacgtttggagcaaggtgaactcaagcttcgtgtcaaaacgctgggatcag

SEQ ID NO: 17082 - DNA, 363 bp, Zea mays
  Clone ID: LIB84-001-Q1-E1-F4
ccttatccttctcctcgcccgcatttcatttcgttcggcgtccccacacggccacaccggaaaaaagaccccggcaagaacctcgctctccggcgtctccggccaatacccatggaggccaccgcagtgccgagggctctgttcctattcgggacatcgccggcgccgtatcgtatgcgtatgaactgcttgcgcgtagctattggaggagatgtgaggcggcagggggccgtggcagtgtgggcgaagaagaagagggggagggggcgggatagcgagacggaggaacgggtggacacgcacagcttcacccccaaagccgggccgaaggtgccgggctgttccccgaaggcgttctgctta

SEQ ID NO: 17083 - DNA, 338 bp, Zea mays
  Clone ID: LIB84-001-Q1-E1-F6
aatgatgatggtctaattcacctaaaaggcctcatacagctaaaaaacctggagctttcagacactgaagttggaagcaatggacttcgtcatctttctggtctgcgtaatttgcagagcatcaatctctctttcacattggttactgacattggtttgaagaagatctctggcttgagttcactgaagtctcttaatcttgacaatcgccaaatcacagatactggtttagcgtctcttacaggtctcactggattgacacacctcgacctatttggagctcgcataactgattctggcatgagctgcttcagatttttcaagaatattcaatccct

SEQ ID NO: 17084 - DNA, 404 bp, Zea mays
  Clone ID: LIB84-001-Q1-E1-F8
aggctggagaaggccaaagagcactacctcactcgccttaaacgagaatgggagcaggatgcggctgcagcggcgtcaaaggaagctgctctgaaagataatgcagagaaccagaagccgaaactggataaggctgctttggagggcttgaagattaacatctacttcccaaagctgaggaaggtgaaagctttgccactgaaaggcacaggaaagcataaatacagtttccgacatattgaagttccttcttatccaattcatttctgtgactgtgaagagcactgtggacctcctgaggaagctaataatgaatatgcttctgttatcaatgctgctgcatatgagaaggaacgtaacattatgaattctgtgatgaaaaagctttttgagaaagaaaatga

SEQ ID NO: 17085 - DNA, 382 bp, Zea mays
  Clone ID: LIB84-001-Q1-E1-F9
acaggatccagtggaccagacaatgaagtacccaagggtgatgcaaaaaccatagggaagaataccctttttgcaccacgagctctggttaaacctcttggatggacaaacaaggatgagaagaaaccagatgttgcaggggagttgaaatcaaatgaggagttccgaaatctgttactaaagaagtgatatcagttggcaggtgtggatctccatgccccaatccagtgccaagatttgtggtgccttcatctctatgttagaatgatggacctgtagtagcagcttgaactggggatctacaaccgttatgtcttaccccgatgtagacatgaatatttctttctgctagggagattatacaaaccatgccgaattgcag

SEQ ID NO: 17086 - DNA, 419 bp, Zea mays
  Clone ID: LIB84-001-Q1-E1-G10
gagatcaacagagcaatcctgaacctttctctgcgccatgatctgcatattagtgcatacggagaaggaaatgaaagaagactgactgggaaacatgagactgcgagcatcggaacgttctcatggggtgtggcaaaccgcggctgctctatccgtgtggggcgggataccgaggcaaaagggaaaggttacctggaagaccgtcggccggcatcaaacatggacccgtacattgtgacggggctactggccgagaccacgatcctctggcagccatccctcgaggcggaggctcttgccgccaagaagctggcgctgaaggtgtgaagcagctgaaggatggttcaggcaccaatataaaccggtccgcgacaagattgatctttgtgtccatggcctgggtcttgcgactctctgct

SEQ ID NO: 17087 - DNA, 416 bp, Zea mays
  Clone ID: LIB84-001-Q1-E1-G11
actagttctagatcggcgagcggccggagtgggagcgcgcccgcgccagcgtgcggggctcggtgcacgtgccgctgttcgtgggggacgacgacatgggccccgtgacgctgctgaagaagtgggtccacttgggctacatcgggctctggaccggccaggccttcaccaagatgaacgagcgcttcgtcgacgacgtcgccgccgccgtcgacggcagcaaggacgccaagcttctcgtcgcttgtggcgaaggcctcaggtcgttgatcgcggtgaggatgctgcacgacgacgggtacaggaacctggcgtggctcgccggcgggttcagcaagtgcgcggacggcgatttcgcagatgtggagggggagagcaagctgcagtacgccaccatcgggggggcgtcctacatc

SEQ ID NO: 17088 - DNA, 425 bp, Zea mays
  Clone ID: LIB84-001-Q1-E1-G3
ctagagttgcaacttactcgagcagttgccttaagtgacccatttgtgtatcatcaccaggcccgattaatggaaagcattcctattgggcaggattctgttgaatcggcatctgctcgagttttgatggccgtgctagagttgcaacttactcgagggcacagtcgtcaaaagtggcagcagttgtacaccggaagttatgcagcatttaagatgatggaaatggccaagaatagggcttgtacccaggcacaagaacgacttgaggaaacaaaggttcaagcagaacaggttattggactaaagcatcaggtgatagaacttcagacgcaacaccaagctgatcagaatcgcattaaggcgcttgagcatcagctagctaatgctcattctaaatcaaaagttctgagtcagcaacaagaaga

SEQ ID NO: 17089 - DNA, 361 bp, Zea mays
  Clone ID: LIB84-001-Q1-E1-G4
tcgacgcacgcctccaggatagctcatgcaacacactcagctatccagcaaaagagatcgagaggcacgagtcatggccaccgtcagcgccgccgtggtgaccaccatcgttgcccgcgccgcgatcgccaggcccaatgctctagggctgcctgcgctgagggcgaggagcgagagggtgcggtgcagctacgccaacgacgcggccccagtcagcaccaagggcgcacgcgcgtcgctgctcgccgcagcgggcgctgtgaccgcgtcagcggagcccgcgctggcgctcgtggaccagcgcatgtccacggagggcaccgggctgagcctccggctcagcaacaccctgcctgggtgg

SEQ ID NO: 17090 - DNA, 107 bp, Zea mays
  Clone ID: LIB84-001-Q1-E1-G5
tcgcgggtcgacgcacgcctctaagttgagtcgtgtcacaataggtgattgtcctactacgatgcaggtacaacagtttgcacaattattcttcatcttagtctgct

SEQ ID NO: 17091 - DNA, 421 bp, Zea mays
  Clone ID: LIB84-001-Q1-E1-G6
ggctgaggttgcagggtgcctctgttccagaaggagctttgtctctggcgcattggaatccagtgccgcttcagcggcgtgtatctgatttggaggtggcaaatgccgatatggctcagcagtactctgatcttgaagaaaaatattctcaaggtcagactgaactggcccggcggtgctctgatcttgaagaaaaatattctcaaggtcagactgaactggcccgggtttctgcttctctgaacgatgttaacacgctgaactctactctccatgctcagctcaactctgaaaaggaagaaaaacgtgcccttgctacttctcgtgacaaccttgataagctataccgtgacgccagcaactcattgaccatcttggagaggagtcatcgcttcaccagggaggagttagataatcatcg

SEQ ID NO: 17092 - DNA, 53 bp, Zea mays
  Clone ID: LIB84-001-Q1-E1-G7
aaatcgaggctccgcgaaacacggcggtgaggatgctgtttagcacatggacg

SEQ ID NO: 17093 - DNA, 249 bp, Zea mays
  Clone ID: LIB84-001-Q1-E1-G8
cgtcgagcttccaggtcctaaaatgatccgaacaaatgtgtggtgaatgtatgttcccgtgcgatggcacgtgacagagccagttgcggggttgtctgctaaggtaccatgtatgcgggtggcctgcataggtatctgtatctcccgataatctccgcctgtggcacgattaactggaagcccagaacgcatgtctttatctgcgtgctgctgggaaccctgatcccatggtgcggtggacgctccatc

SEQ ID NO: 17094 - DNA, 394 bp, Zea mays
  Clone ID: LIB84-001-Q1-E1-G9
ccggcatggacaccatcgtctctctctcgcctcagatgcttcgccagcgccagggccaccagtctactgcatcatcatcatcatcagcttgggctattaccacagctaggatcggtcgccacctgtctactgcatcatcctgttccagcccgcggctgctcatcaagcagagggcgacggcggcatcggcaccggcaccggcaccggcaccggcacagaaagagaaagaggtcgtcttcgtggctggcgccaccggcagagttgggtcccgggccgtaagggagctcatgaagcttggcttccgtgtgcgcgctgccgtcaggaacgcacagagggccacgtcgctggtgcagaaagagaaagagcagcagctgcttgagcttgtggagtgtga

SEQ ID NO: 17095 - DNA, 433 bp, Zea mays
  Clone ID: LIB84-001-Q1-E1-H10
actcgtgggtcgacacaagcctctagattgagtcgtaggaggcgttcgagctcgggcgggcgccggtgtactggaagaccagcaacggcctgccgtcctccccgggcgaggggctgaccctgttctacaacccggcggcgagcaagatggccccgaacgacgtgttcggcgtggcgttcaacggcggcttcaaccagcccatcatgtgcggcggcgagccgaggcagatgacgctgcaggtccgcgggaaagccgacccgcccatctacaccatcaggatacgcgtgccgcagcacgccacaagcttgatcttctccttcaccaacggggccgagtgggacgggccgtacaccctcaagttcagggtcccgaagccatggcagaagaagccgctgagcttcttcaacgagggcctggccgacgagctcaacag

SEQ ID NO: 17096 - DNA, 415 bp, Zea mays
  Clone ID: LIB84-001-Q1-E1-H11
cgagatcacttcgccgccgccgctttcgagatctccgggtggagcaagcgagcaaaggcagcagccatgtcgctccgcgtgctgaaccctaacgccgaggtgctcaacaagtcggcagcgctgcacatgaacatcaacgccgccaagggcctccaggacgtgctcaagaccaacctcggccccaagggcaccatcaagatgcttgtgggtggagctggtgacctgaagctgacgaaggatgggaacaccctcttgaaggaaatgcaaattcagaacccaactgcaatcatgattgcgaggacggctgtggcacaggatgacacaagtggtgatgggacaacctccactgtgctatttatcggggagcctaagtaacagtctgagcggtgcatcgaatgaaggactcatccaagat

SEQ ID NO: 17097 - DNA, 207 bp, Zea mays
  Clone ID: LIB84-001-Q1-E1-H2
ctcgcgtatcgacgcacgcctctaggatgagtcgaacgactggtaggtgtgtgtgtgtgtcgtgcgtgcccaccggccatatcccggtgcggcagcacgtgctattgttacgtgttgtactgccgccagcgtacgtgtctgtgtgtctcgatcatatctgtacgtttttagatttagaagaaaaaaaaaaggcatgtccgtgtctgt

SEQ ID NO: 17098 - DNA, 420 bp, Zea mays
  Clone ID: LIB84-001-Q1-E1-H3
acaagactctataatgagtcgtagtacattgattacgttggttcctggggtcctgcaatcatcggccatgcagatgataaggttaatgctgcattgattgaaactctgaagaaaggaactagctttggtgctccatgtttgctggagaacgtattggctgagatggtcatctctgccgtgccaagtatcgaaatggtccgctttgtcaactcagggacagaagcctgcatgggagcgctccgcctcgtgcgcgcattcaccgggcgggagaagatcatcaagttcgaaggctgctaccatggccatgccgattccttccttgtcaaagccggcagtggtgttgccacccttggcctccctgactcccctggcgtccccaagggggccacctacgagactttgaccgcaccctacaatgat

SEQ ID NO: 17099 - DNA, 422 bp, Zea mays
  unsure (1)..(422): unsure at all n locations; Clone ID: LIB84-001-Q1-E1-H4
acgcctccagtgtgcgaccacgtcatcaatccgggccactggaccgaggacatgcgcgacgacgcgctggaacctgccgacctcttcagccgccacctcacggtcgtcgacgtcggcggcggcacggggttcaccacgctcggcatcgtcaagcacgtcaacccggagaacgtcacgctgctcgaccagtccccgcaccagctcgacaaggcccggcagaaggaggccctcaatggggtcaccatcatggagggcgacgccgaggacctcccgttccccaccgactccttcgaccgatacatctccgccggcagcatcgagtactggccagacccacagcgggggatcaaggaagcctacnaggtcctgagatttggtgggctagcttgtgtgatcggcccggtctacccgaccttctggct

SEQ ID NO: 17100 - DNA, 409 bp, Zea mays
  Clone ID: LIB84-001-Q1-E1-H6
agcagctcagagcacgcgcagccgcctcgcctcgcctggagctcacgcagccgcctcgcctggagctcgcgcagccgcctctatcctcgcctggagctcgcgctagggttcctctcgcagccgccgctgttgaggtgctacttgcaaaagcgtgtactgaacagctcaaaaggccctgctatatgtgcactgcgtgctcagcctgataagagagagtatgcaatagagatgaagaacagtgtggaaagcacagaaaatcttttcattagagaagcaatggctacagaggttttaattggaaaaaatgacaccattgagggtgtttgcactttcttcagcatggactttatgcaccatctgttgtacttagcaccagaacattcatgagtgtttctgggggcaagctgct

SEQ ID NO: 17101 - DNA, 147 bp, Zea mays
  Clone ID: LIB84-001-Q1-E1-H7
gtagtatgacagaatcatgtggcacttgctgcattgattgaactggttcatatctgttggggtcttggggcttgatgtttgcttgatatcgtgttgcgcgtttatggtcattgcttacctttcaatgttggatttatggtctcgctt

SEQ ID NO: 17102 - DNA, 185 bp, Zea mays
  Clone ID: LIB84-001-Q1-E1-H8
cctccgcttccatcgggttcgacgacttcacctatggaatctgtcgacaatccacgacgacgaggcaaactgctttggacgcaacgtcaaagggtcccacgctcgcagggcgtcgaggctttacatgccccagatccatcaagaacctcaccccacaaaaattttcactgctcggtgactctccg

SEQ ID NO: 17103 - DNA, 412 bp, Zea mays
  Clone ID: LIB84-001-Q1-E1-H9
ctcgcgggtcgacacaagcctctaaattaagtacgaaggatgacacacctgagcctctttgccaggtcatgcttcgtgttggtgaccttgagcgttctatcaagttttatgagaaggccctaaggatgaagctcctaaggaagaaggatgtacctgattacaagtataccattgccatgttgggctatgctgatgaggacaagacaactgttctggagctgacgtacaactatggagtcacagaatacagcaagggcaatgcatatgctcacgttgccattggcaccaatgatgtgtacaagagcgccgacgcggttgatctgacgaccaaagaactacgtggcaagattttgcggcaaccatggcctctacctgggatcaacactaagatcgcctcttttgttgatccaga

SEQ ID NO: 17104 - DNA, 199 bp, Zea mays
  Clone ID: LIB84-002-Q1-E1-A3
cccacgcctccgtttatgaatgatacattcctctccaactttcttacggaagctgggattagcatcaagagacaccagacccgtataagtgcaagagctcagcgtgagattgcaagagagatcaggaccgcacgtgcgtttaggttaatgccttttacaacaatgggtataagcacactcatttttggcaaaagtgcgg

SEQ ID NO: 17105 - DNA, 401 bp, Zea mays
  Clone ID: LIB84-002-Q1-E1-A5
tcccggggccacatacgcgtccgaccacgcgtccgcccacgcgtccgcacatacacaggtcacaccgtcacacgcacactgcaccgtgtgcgcggctactccccgccatggccaccacctccgtcgccgcctcctctcgccagccccatctgtcccgcccccgccgggggaactccagcgccacctccagaacctcgatccggggctgcctcctgcccatccgatgctcggctgcctcgtcgtcgcaaccgccggcaagcggcggtgaggagggagagtccgggcgccggcggctgtcgaagcagtcttcctgagaggatagagatgtggagggggacgactacctctaccgcctcgggaagggcgctgagaacttggacatcaccgttcgcacacggtcc

SEQ ID NO: 17106 - DNA, 409 bp, Zea mays
  Clone ID: LIB84-002-Q1-E1-A6
cacacgcgtccgcacatccatccccttcccttcccttccctcgtgcgccgccggctctccagcgcgccgtctctgcccagatccaggacatatgccccgctatgatgatcgctatggcggcacgcgcttgtatgttggcagattggccccccgtactcgttctcgtgatttagaatatctctgcggcagatatggaagaatacgagaagtggagttgaagcgcgactatgcatttactgagttcagtgaacatcgtgatgccgatgaagctcggtaccaactagatggcacggatgtcgatggaagtcgcattgttgttgagtttgctacaggggtcccacgtggtccatgtggctcacgtgaatatatgggaagaggacctccaccaggcacaggtcgttgtttcaag

SEQ ID NO: 17107 - DNA, 405 bp, Zea mays
  Clone ID: LIB84-002-Q1-E1-B1
ccaataaccactgcaagggtgaagttgttctagtgttccagccagtgttaatcctctcccttactgcagagttaagttgttcctgagctgagtgtcaacctcctgtgtggtgaccagggtcatccaagtgcccacctcgccgcggtcaagcaatcacaagcgattccccagctgtacagtgcatgtttcgtgttctccttagaacacctaaacgaggtggtatttgaagaagtctactccaatgcctgctcctcaagtggatgaagccatctaactgggtattggatagagggatctagaaccacttcactgcaacaaaggatataactttgtgctgctgtgatggtgttaagtgccggtgggctcggccttcttatataagtataccccgtctttatcttccta

SEQ ID NO: 17108 - DNA, 348 bp, Zea mays
  Clone ID: LIB84-002-Q1-E1-B10
acactcagcagcgatcgcagcaccgcggcgagataatgagcagcctgtcctccggcatctctgcctcgccatctgcagcgcccagcaccgctcggcgccgccatgacgcagcgccgcagcagctgagggtgaaggcggcggcgcggccacagctgctgcacgccggccgccggcgttcgagtgtcgggaggaggccgggcggcggcgcggtggtggtgagggccgggcctgggccgctgtcggagatcgagccggacctgtaggaggacgccatcgacgtgtaccgcaccaacggcatcagcccggaggacttcgagtacgggaagtatgacggacaccacacctatt

SEQ ID NO: 17109 - DNA, 332 bp, Zea mays
  Clone ID: LIB84-002-Q1-E1-B11
cggacgcgtgggcgaggtgacagaactgccgttctttgcaacgaaagtgaggcttgggcgtggtggagccgaggagatcctgccgcttggccctttgaatgatttcgagagagctggtctggaagcggcaaagaaggaactgggcgagagcattcagaagggcatcgctttcatgagcaagtgaagtggtacggagggagatcgtccctgagtcagattccggaccatacgtagtaacgtagatgtaagggtgttgtgatatagtgctcctacctatacttgtaaagccgcggtaaaaagaaggctaattaccctttagcaactgtgaccat

SEQ ID NO: 17110 - DNA, 388 bp, Zea mays
  Clone ID: LIB84-002-Q1-E1-B3
tatttttttattttttcatttttaagtgtatcaacactattatagggtaacagaaccaagaaacaattggacatgtaacagtagatggtacctcttagccaaatcagttgcaaccagataagtgtatttttgtcgtgaatgtcataaattatgcaaattcacttggcgaaagagtgtcatactacaatttcacaagaacaacccctaaaactcaacacataataacaactacagagcatttcgctttgagtaaacaaggaaaattctcgtggtggatatgatatatccagtttactcaatgattttgttgatgacaccagcaccaacagtcttaccaccctcacggatagcaaacctcataccctgctcacaagcaacaggctggatg

SEQ ID NO: 17111 - DNA, 299 bp, Zea mays
  unsure (1)..(299): unsure at all n locations; Clone ID: LIB84-002-Q1-E1-B4
cggacgcgtgggaaacggacataccaagaagttgcaaagctagacttccctgcaaaatagtgtaatctttgaaggtancagtgaggatacaagtgtcaaaggcttctggaaattgtgaggtactttggtatgccaatactcttgggactagttggcccaaatttctcgagtagcatctagacatataccaaatatgtatgtccatgtgtaacttcttaacatagatgatagcgactctaactataagagtaactatggctgcggacttccccaggatcttgttttatcatcctttagac

SEQ ID NO: 17112 - DNA, 402 bp, Zea mays
  Clone ID: LIB84-002-Q1-E1-B5
aacacgcgtccgatgtggggaacgaccatggaaagcgagacatcagcaagcaaccagaaccagcaggcgaggcggatcaaatatgcagagcatggagagagatatagctagagcctagagcgagcaccagcaaaccaaacaagcagaccaccttctccacccggccggccttcgtcttcctccgatccccaggccccagccactccccgtacaagccaaagagaccagtaggtaggcaggcagttcatcgtcgatcgagcaagatgtcggactggggccccgtggtgatcgggctggtgctgttcgtgctgctctcgccggggctgctcgtccagctccccggccgccaccacttggtggagttcggcaacctgaagaccagcgccgtctccatcgtcgtcc

SEQ ID NO: 17113 - DNA, 155 bp, Zea mays
  Clone ID: LIB84-002-Q1-E1-B6
aaagtcaactttcacgtctatgattgacaagtctgaaaagattcatacattaagtgatagaagttgtgtgctaaacaactgatgcattttcttcattggaaaattaattaccattccttgttacctgatttattcaaacaagttttctgatgctt

SEQ ID NO: 17114 - DNA, 170 bp, Zea mays
  Clone ID: LIB84-002-Q1-E1-B7
ggagcttctcccgcggcggcggcgtccatcacggtaggtcgttgcgtgcgttcgtcagtcagaatttcagaaccgagttcaaacgaaatgaccgagggatggctgtgagattaagatccctcgatggcgacgcgggcgcgggagaagctccgagagcggctgttgaagga

SEQ ID NO: 17115 - DNA, 105 bp, Zea mays
  Clone ID: LIB84-002-Q1-E1-B8
ggaaatggaagctctgctgtactttaagaaacttgatgaaacctttgtataactcaactgtacctctatctatcccttgtgtgtatttgagaacgatttcagagc

SEQ ID NO: 17116 - DNA, 415 bp, Zea mays
  Clone ID: LIB84-002-Q1-E1-B9
cccacgcgtccgcccacgcgtccgcccacgcgtccgttggtcttctctctcggatcgcggttggggggttgcggaatgggagcaaaggcggaggagtgtgaggtgccgccgctggctgcgaacgcggaggaggcagcttccaccaatcagtgcaccctcatcttcaaaggctgttccaacagcatggaaaaagtctacgccatcagcagtcctagtaagaaaagaaaatcacagtatgagctgagtgatccaaagttgctaccacttaaatgcaagtttcgcaaacggttatattgccaggatgatgagtctgcaaccacagaaagtttaggatatgatggtagtttcatgaacaagacctctgggacggacatggtcagcataacctgaagaattggactctttgtgagaacac

SEQ ID NO: 17117 - DNA, 400 bp, Zea mays
  Clone ID: LIB84-002-Q1-E1-C1
cacacgcgtacgcattcctaaagctagcaaagtccatatggttgctgcacaggttggcgtactccttcgacccaaaggcaaaggtgtttcaagtgaaaaaggggagtgaattttcggatatccacatggagagcgtcgtgaagaacatcatcctacaagaaggtgcggagaggccaaaagtcggcctgatggtgatgcctggtttcctgatcgggaccagcgtcatacagtcccgtgtgtacctttcagatgccaagtgtgctgactgactgaagattgcacaaggagcttgagggggtgcctttgctccttgggagagctaccagcagcataagtttatggtggactgttgtcctgtatgtaatgcgtgagacctgttgcttcaatgccgtgccacgtg

SEQ ID NO: 17118 - DNA, 425 bp, Zea mays
  Clone ID: LIB84-002-Q1-E1-C10
aaattgcgctgctccataattacttgtgctctaagctttgatccaaatccacacacattgatctaaaggccaggttgcagaatggagagaacactgatcacctctaacctctgcttgagtgcacacgcttcaagatcgtcccggagggttcactacatccctccttccgcctctgctgctgcacacaactccagctacaggaagaagagtgccccgtctctgccgccgtcggccgccgcatctgccactgttgtcaccgcccctccgtccactgacaatgtccagtccactgctccgaaacagaccgggcgacaggagctggaagatctcgtggccgccaagaccagcacttcaagaactgcacgtgcgccgagccaggctcgggctcgggctcgggctgagcctcgccgccggcctgccccggc

SEQ ID NO: 17119 - DNA, 406 bp, Zea mays
  Clone ID: LIB84-002-Q1-E1-C11
ccgacagcgcgactgtcgtgcaggccaccgccgaggatggtgatgacgacacctgtccgagcagggatctgcttgtcgacgacattggtgggctcatcagctggagcaggagtccggcggcacccgcctcagcggctgcggccacgtgcagcttccgggcgtcgccggcgttgtccgtgcagcaggacgagatcacggacgctgccatgctgctgatgacgctgtcctgcgggcttgtccggagctgatcgcctgatccacgatctgctacctctacgaaggacgacccagcgcaccgtaggcttttcccagctagcagctagcttgtgcccttgactgttagctagcgttactgttactgctgttaccatcgtcgtctaacgtaatacctgtagtgcttttgttt

SEQ ID NO: 17120 - DNA, 103 bp, Zea mays
  Clone ID: LIB84-002-Q1-E1-C2
aagtgctgatccgctgatgccaatgtaaatataagtgttaggtaatgcaaatattagcatgacagtgcatattcttgtaaatgggaatttaccatgttattgg

SEQ ID NO: 17121 - DNA, 403 bp, Zea mays
  Clone ID: LIB84-002-Q1-E1-C3
gtgagtgcaagtgtggatcctgtgcaacgactgcagcgcgacctcgagcgtgcggttccacgtgctggggcacaagtgccccgcgtgcagctcgtacaacacccgggagacgacggctgcgtgccccaggatctgatgcgaaccacaggccatgtcacaaaatgccagggagatgccgtccaacgatcatctgtctgcaggacgttgctgcgcttaaggttaaacgctagcgcgagaccaggcctggtagtccagtcctgagtttggggctggagcatttgtaacgttccggtaaaatgtgatgcgtccatgagtgctgtccaggcagtgagcacacctgtggctccgggccggctcaaggtccctaagcacgctgcaagattaggcgggctactcaggttta

SEQ ID NO: 17122 - DNA, 417 bp, Zea mays
  Clone ID: LIB84-002-Q1-E1-C4
cggacgcgtggggcacaagatatggaagtactttatgtggaaacaaacactttcagactagcatcgcacatttactgggcattatgggcccttattcaggcaaaggtatccccaattgactttgactatcttggatacttcttcttgcggtatggtgagtacaagaaacaaagggagtcctgcttctccttggcacaaagctttctctccgagctaaaaaatggctagagcctgagaatctgttcacgagtttatactggtgtacgcatgctcggagcgggtacgcgttgtgatcatcggctgctacccagaaactctattgtagcggttgtagcagatcttcattgttgtatctgatgttaggttcgtcatttgctaaggactattttgggtactctactattgagcttaatccat

SEQ ID NO: 17123 - DNA, 400 bp, Zea mays
  Clone ID: LIB84-002-Q1-E1-C5
aacagagagattactacgatccaacagttctagagcaagagagaggaagacacaccgcagagttagcaggctaataacttgcaggagcagcaggaatggcggcgacgcgtcgcctctcttgctttctcctcgccgtgcttctggcaggagtggccgctgccaccgccttcgacgaagcggctgctgccggcttcgggcttggccacggcgcgcgtttcgcgcgcaagcatggacgtgctgccgctgagatgccccagccggagccacaacctaaaactaagccggagccccatatgcagccactgccccagccagaacctaaaccgaaacctatgccacatccagagccaaagcctgaacctcaaccaaagcccaaccctgaacctcaaccaatgcccaa

SEQ ID NO: 17124 - DNA, 395 bp, Zea mays
  Clone ID: LIB84-002-Q1-E1-C6
atcacggcgccggcggcggaccccaacgccggcgaggtgtactacaggctgatgtcgcggttcatgtcgaaccagagccggtacacgctggaccggctgctggggaagatgtcgtgcccgctgctgctgctgtggggcgacctggacccgtgggtcggcccggccaaggccgcgcggatccaggagttctacgccgacaccgccgtcgtgcacctgcaggccggccactgcccgcacgacgaggcgccggagcaggccaaccgcgcgctgctcgagtggctcgcggccctcgacgcccgcgctaagtcggccgagcccagcctacagaccgtctgatggatcgagcgcaaggggcttagcgtatgctagtcaaagaatacaatttgggggcctat

SEQ ID NO: 17125 - DNA, 411 bp, Zea mays
  Clone ID: LIB84-002-Q1-E1-C7
aaaatcgtcattttgctgattagatacttaaatatgatggatttgccaactttctttatccttgtgatgaaaacggctgaaccaccagcagccttgccacttgtgacattaacaagtaacttgcactacctgacttgtgactagccatatcatatctgatttcttaagctcatcatgtttacacatgttttcttgtatatactagttttgtcatttgattctagtaagaagtgattttctaaagctgttgaagtatcataagcatataattatgatgagtttgaagtgatattttattttcatgtatctcatttttgcataaacatttatgtggtattatccaggttcaagattgaagcaagatacaagagcatggcagaactaaggtgatgtttcttgttgtagactcct

SEQ ID NO: 17126 - DNA, 401 bp, Zea mays
  Clone ID: LIB84-002-Q1-E1-C8
cagacgcgtgggcggacgcgtgggttgctggtggtgcaacatatactatggaatcgggaactgcctcacagagagttgatgttaatgttatgtatgaatcagaagattcaaaccgacagaaaggcaacattaggtccatgacactagttggaaccagtggaccaaaaataatttcttctgtcagtgcggaagaaagcactactactccagcagatatctctgaaacagagaatgtatcctctgatttgcctcccagtagtttaaggaaacacaagatttcaaaacatggacctaggtacagggagcattctcctggcaaaaggcagaaggttttcacttctgacatttcttttgaaggcaatataatgaataaactttccattccggagattcgtgacaca

SEQ ID NO: 17127 - DNA, 427 bp, Zea mays
  unsure (1)..(427): unsure at all n locations; Clone ID: LIB84-002-Q1-E1-C9
cccagagatactgatttgaattgtataggcgactgggttgtcgagtcagttgtcaagaagaagcttaacgtccttagtgtccatttgacaagctcaaagtcattggtcggtatcacaggggttatatcagagattcatcaggaaaggaagggccgagatgtatatatactgggttccgcaaatgttggaaaatctgcatttatcagtgcaatgctaagaacaatggcgtacaaggacccggtggcagcggcagctcaaaaatacaagccaatacagtctgctgttcctggaacaacccttgggcctattcaaattgaagcatttttaagcggagggaaattgtatgatacacctggagtccaccttcaccatangcaagcagcagttatccatgctgatgatctgccttctcttggcacacaaagtc

SEQ ID NO: 17128 - DNA, 361 bp, Zea mays
  Clone ID: LIB84-002-Q1-E1-D10
cccacgcgtccgaagacgcgtgggcaaccttaatctcttctctatcattacagtgatgtcatttttccttttggcccctgttaccttctttacagaaggtgtcaaaattactcctacatttttgcaatctgctggtctgaatgtaaaccaagtccttacaaggtgtcttttcgctggactgtgtttccatgcataccaacaggtgtcttacatgattttggcgatggtgtctcctgtcactcattctgtgggcaactgtgttaaacgtgttgtggtcattgtaacatcagtgctgttcttcaggacacctgtttctcctatcaactctctcggtactgcgattgcacgtgccggagttttc

SEQ ID NO: 17129 - DNA, 369 bp, Zea mays
  Clone ID: LIB84-002-Q1-E1-D11
cacacgcgtccgggcaaatatgtcatggaagatctacataagattggtgggacaccggcagtcattcattatcttctggagcaaggtcttcttgatggtgattgcatgactgttactgcaaaaactctagctgagaatgccaaaattttccctcctttgtctgaagggcagcaaataattcgaccacttgacaatcctatcaaaccaactggccatattcaaatactttatggcaatcttgcaccagaaggttctgtagcaaaaataactggcaaagagggactatacttctcaggtcctgcattagtttttgagggtgaagagtccatgattacagctatctcagaaaacccagcaaatttcaaggga

SEQ ID NO: 17130 - DNA, 392 bp, Zea mays
  Clone ID: LIB84-002-Q1-E1-D4
cacgctcgtcctcctcctctcctcctggacagcagagcacagcacaacacaccgagaaagaacaagcagccgccaccggagctcggaaccaccatcagcagcagcacacccggtcaaccttccacacgcgcacacacacacacacatggcgtcgcagcagaggcaacagcaggcgggagcggcggcggcgtcctccgccgtgggcttcgaggactacctgccggtgatggcggagcggctgggcgaggacgggctgatgcgggagctggcgagcgggttccggctgctgatggacccggcgcgcgggctcatcaccttcgacagcctccggcgcaacgcgccgctgctgggcctgggcggcatgtcggacgccgacctccgcgggatgctcg

SEQ ID NO: 17131 - DNA, 414 bp, Zea mays
  Clone ID: LIB84-002-Q1-E1-D5
tattgaccctgaccggtgtacttgttacttgtttctattgtaagccatctattgtgatcttgtcatgaggttctagtattttcgcaacggacaaaagagttgtagagtactacctagattcgaaaggtcttgatgtttgccaaattgatggtagtagtgttaaatcggaatacaggaggaggcaagtcaaatgcagttgtttgtgacagtatgttactattttactttacaatatcttcatgagaaaaagatgaaccctgtttggctgtatactttaggcttttaatgaatgctcatattgttactttcatacatgtttgcgtgaatgggaatttggcatgtgatcggataacatgtactcagttgcatcttaactgcaaattgtttaaggcacattttagattgcaagttctg

SEQ ID NO: 17132 - DNA, 191 bp, Zea mays
  Clone ID: LIB84-002-Q1-E1-D7
aaacacacatccagttgttgaatggtatacttaagttaaaataaaaaaaaaatcacaaaatcaaaaaaaaaaatacaaccacaaccaaaaacataaataaaataaatcaacaaaaaaaaaaaaaaaaaaaaaaaaaaaaaaaagggccccccccctaaaaattccaaccttactttaccttcaattcaaat

SEQ ID NO: 17133 - DNA, 419 bp, Zea mays
  Clone ID: LIB84-002-Q1-E1-D9
caatggtggcgctgctccagttgctgcttccgccccagctgggggtgctgcagctgctgctgcccctgctgcagaggagaagaaggaagagcccaaggaggagtctgatgacgacatgggcttcagcctgttcgactgagaccctcgctacccagccattagcaaattcgcttatgctgtccaagacttatcttacgttatgtctgtaggcttttgttattacaagtactcaagttttgagtttttgagatgtggctatgacaatgtgatgaagaaccctaaaccatcgtattagagtgaaacttgtttctatatagagttccaagtttcttgaacctcaaacttgctctggctgatgctctgatgttttcagtcggtgccttttaatcgaagtcaaccgattttcgaattgtttgctg

SEQ ID NO: 17134 - DNA, 390 bp, Zea mays
  Clone ID: LIB84-002-Q1-E1-E1
cagggcgtcatccctattcacatgcagttctctgacgacgcagaagaaactttctccagagcaattagcagcttgctgaaagcacaatatgtgaagaagggagactacatcactcttgttcagagcggagtgacttcaatctggagagaggaatccactcaccacatccaagtgaggaaagttcaggtctgatgtgccggtgggaattggtcgtctgagaaattttgatagcgccgcctgatgtgttatcatcattatatgtgtaattttactgttttaccacgagatttctacgtcgagttatatgttgtgtcgaattcacgtgtaggctctgaatcttgaatgtgttcgttcattttcggctgtttcacactgaagtggttaaagctc

SEQ ID NO: 17135 - DNA, 417 bp, Zea mays
  Clone ID: LIB84-002-Q1-E1-E10
gttaggatgtaatggtctagccatgccagtggaagttgtgcagttctgctggaagtacaaccttgtaagattgcaggaactgtttaaggaggaaggagtcgaggcaaagctaaggtttgaaggcgacaagccctatgttactgacaactcaaactacatcgtcgatttatacttcaagacgccaatcaaggatgcgttggcagcaggacaggaaattgcagctctggaaggagttgttgaccatgggttgttcttgaacatggcgagttcagtgatcattgctggaacggacggtgtcagtgtcaaaacgaagtgagtttttgagttgctttgttgtttgtgttgagttttacaatttaatgtacaagctattggggtaaaagcagctgataagatgcctcaataaacgtgttcccc

SEQ ID NO: 17136 - DNA, 370 bp, Zea mays
  Clone ID: LIB84-002-Q1-E1-E11
gaagacactcccactagttagttatgtgcagggccatcctgaaatagttagccaacttgtcgatcttattgggattacttctatcatggaggttttgattcgcttaatcggtgcagatgaaactatgtattcaagctatgcagattctatgcaatggttagatgacatacaagtccttgagatgattgttgacaagttcagcacatcagattctcttgaggttcatgcaaatgctgctgaaatcctttgtgcagtaactagatatgcccctccaacacttgctgcaaagatttcgagtccaagctttgtggggagattagttcaacatgcttttgaagattcaaggccaaaatccgtgctggtccactca

SEQ ID NO: 17137 - DNA, 404 bp, Zea mays
  Clone ID: LIB84-002-Q1-E1-E5
aacctccgagctctccttctatcagcgaaaggtgttccgcgtcgctgagcacgctggggtcacgttcgccagcctgccgacgtcgcgtcctctcgcgcttcctctgcaatgagtgcatcaaccactccttcatctacgagacgccgctccccgtctccaggctcgctgacaagctgcaggcgtggctagacccggtgaacttgctgtcgggaaagtccagctactgtggtttctgtggcgagcctctgcagttcgtcctccaggtgttttctttgtgtgcaatgaagttgccacagtcgactgcttattgtttggatatcgacttggtcacagttaggcttggttgtgtttagatttatgcaccaactgaagataatgtagcagccttccaccgaacgcggttc

SEQ ID NO: 17138 - DNA, 350 bp, Zea mays
  Clone ID: LIB84-002-Q1-E1-E6
tatttttttttttccaattaaagttggatttccttcctacgctgcgttccacattgttcaagacaatgattatatgagcaatgtgcattctaaaagaatcctgaactaaaaacgggtcaggacatctctctcaggctggtggccatcaggatcaggctgcatccggtagccgccgtcgccgtcattctggtcgttctgttcgttcatatcaggaagcgaatcattactggcagcccccagcttttcctttagggaagcgttctgtgaaagtaggtgttcgttctcatttctgatccgctcgagctcggcgctatgcgaagaattatccgacctcatagcctcagcacgtt

SEQ ID NO: 17139 - DNA, 418 bp, Zea mays
  Clone ID: LIB84-002-Q1-E1-E7
tggagaaaatgagtggaggaggtgggagcagcaagaatggcgtgctccaccaatctctgcttctcggcgttgattcctcctcttccagcctcttcttcttctggctcctcccccttcctcacgatgaagcgtgtgtcctctgttccgtcgttgtccaggtggacaatccgatacaagcaattgggacatgcattatatcagagaagccacgttctggcctttgctagtgcagatgcatcacaaggcaaaagaagctcaggtgagaatgttgtgatggttgatccactggaagctaagcgtctagctgctaaacaaatgcaagaaattagggccaaagaaaagctgaaggtgcattgctgctgtattggagtgtatcattccttagattaaatcaatcttatatgctaaaggaagaaaa

SEQ ID NO: 17140 - DNA, 414 bp, Zea mays
  unsure (1)..(414): unsure at all n locations; Clone ID: LIB84-002-Q1-E1-F4
acgcaagccactccgaggccaagtctacggtttgggaatctgtangaggggagaggggagcgcgctcagggtcacggaggcgaagatgatcgacgtggtgctgaacgaccgcctggggaagaaggtgcgggtgaagtgcaacgaggacgacaccatcggcgacctcaagaagctggtggcggcgcagacggggacgcgccccgagaagatccgcatccagaagtggtacaacatctacaacgaccacatcacgctcaaggactacgagatccacgacgggatggggctccgagctctactacaactacgcgccctgacnccaaccgtgccctgatgtaaggttaatccgaattctgaagtcatgggtgcgcttccagtcgcagcgtctttagctaacaagctcgcatacatata

SEQ ID NO: 17141 - DNA, 403 bp, Zea mays
  Clone ID: LIB84-002-Q1-E1-F5
ggggcgacacacgcctctgtttttcatgtgcagagcagaggaattacatttatacacggtgctgatcaccgctggcgtgatctgcaacaaggatcacaccacctacataccatgcagctagagaggaggatcggccggagctatgtatacgcatcttcgatgatatctacttgaagaagtaggggaggtcgagcacgtagaggagaaagtatgcccagagcacgccggagatgccgccgaagaagaatcccccggtgaacttggcccagccgtcggacgtctgcagcttgtcggcctccttcttcctgccggtgagcgtgagcgagggcgccgtggacgggtccccctcgttgaaggaggcgacgccgtacatggtgaggcagacgctgaggatggcgacgag

SEQ ID NO: 17142 - DNA, 365 bp, Zea mays
  Clone ID: LIB84-002-Q1-E1-F6
agcatcttttcctaactctccccaacaaccctacccgtttcctggcctccgcctccgtccgggtcgcctatcctccccggtggcctctccgcgccgccgacggggagcgggacaaccgcgtgcaggagctgagggtgcccgattcttggctgacgcctgcaggagcaacgcacgaatctgaatggctgagggagacactgcgcaagtggctcgacgacgagtactgcccggagccggccaacgtggacatcagcagcaccgccgcgcggtcgtatcgcgaatcgctgatagcgcggcagtctgatctgggagagatcttgctgaggatggtgggcgacctggacaagctgtcgtacatggagagc

SEQ ID NO: 17143 - DNA, 401 bp, Zea mays
  Clone ID: LIB84-002-Q1-E1-F7
cacacgcgtccgcccacgcgtccgggcgggtaaagttttggtgtccgtgtccctcgttggctcgttcgccgacagggaggacgccgatctggccgacgaagtggtccgggagcttggcgggtggttcggcgtcggagaggtcgcgtcgtggacacacttgtcgacgtatcgcatcgggttcgcgcagccggaccagacgccgcccacgacaccggcggggagggacccgagagttggtgacggattgtacgtctgcggtgaccactggtgctccgccacgttcgatggcgcgctggtgtccggaaggagggcggccgatgctctggccaatgacacgggactgtgaactccctatcatggggctgtgtttgagttggtccgtgctgcactgcagagtgcag

SEQ ID NO: 17144 - DNA, 425 bp, Zea mays
  Clone ID: LIB84-002-Q1-E1-F8
cccacgcgtccgcccacgcgtccgcgcgactccaccgtggggctgctcctgccgcgcccctgttccagctcctatggtggcgctcggtttccagccgtgccgtgatttcttgctcggattgcgctcgacttccagcgccgtggtctcgtcaagatccctgtcgagctcgtccctgcgcgcacgtttttctgcacgcagcttcctcaaatcgtgctcggatctcgtcagccgccgttctctaacctgtgtctcggtcggcgtcgtggagttttggttgatcggctcgtcgttgacctcgccgatgtcgtcgaaccgtcgaactttgttcttccctgctcgatctcgtcgaaccacgaatcccggactttagacaaaaataagcaaagtccctgtgcatcgcttatcaagtactccgtcgaagactt

SEQ ID NO: 17145 - DNA, 382 bp, Zea mays
  Clone ID: LIB84-002-Q1-E1-F9
tgcccattctacaagtttggttacatgtcagcaaatggtgccattgccgaggctattaagggcgagaactttgttcacataattgatttccaaattgctcaggggagccagtgggttactctgctacaggcccttgctgcaagacctggggggccaccatacattagaatcactggtatagatgactcaaattctgcttatgccagaggaggcgggcttgatatagttgggaggacgttgtgtgatgttgctaattcatgtggtcttccttttgagttcaatgccgttccagctgctagccatgaggttgagcttcagcatcttgctataagacatggggagattattgctgtgaattttgcctatcagctacatcatgttc

SEQ ID NO: 17146 - DNA, 382 bp, Zea mays
  Clone ID: LIB84-002-Q1-E1-G1
cagacgcgtaggctgcttctccatcaccgtcgttatcatgcagcctgctggaatgccacagcgggacaggagcatggggatgagcaggcgcaagatgactgcaagtggcgccggatcccgacattcggcgactggaacctgcgggacgacatgcccgtcacctaatacttgcaagcagggacttcttcatcgttgtgctgccggcagagaacgacgacgacgaggatctgttcaacgtgccccagtgttcctgccaagccctacagctacaagaacgttttgggtggatttgtaggttggtcatgtgaattgcatcaaacagggagtcacggacgatattgaagttgtggctgtggatgacccttttgttgatgccaagtac

SEQ ID NO: 17147 - DNA, 387 bp, Zea mays
  Clone ID: LIB84-002-Q1-E1-G10
cattcccccggtccagtggcggacgccctagccaggcaccacaggccacagcctgggctgccccactgccccggtcgccgtcgggcaagcgccgtccaacctgtgcgtcaccgcctccgccttcagtttcgcctccagcaggggcgccgcgtggggtattcggttcgtcgtcgaggagagagagtcacttctgccgagggagcagggatggagccggtcgtggggatcgtggtgtcaaacaagatgcagaagtcggtggtggttgcggtggaccgcctcttccactataagatgtacaaccgctatgtcaagcgcacctctaagttcatggcacacgacgacgctgactcctgcaacattggcgaccgggttgtatggtggggattg

SEQ ID NO: 17148 - DNA, 418 bp, Zea mays
  Clone ID: LIB84-002-Q1-E1-G11
attttcaattgcaccagatgcccctgaaatgttgttgcttgactatcccagtcaccagcgacgccttctaccacttctagcaaaagtatgtctgatgagcagtgctggcaattttatgaaaaatatgtatgtaaagagaactcctgaaatgagcaaagacatacacatttactctagtgctctgaaggcgacactaacttggcagaatatgattacgattcaggagtgtcgcgaggcctgtggaggtcaaggtctgaagactgagaaccgcataggaattttcaaatctgaatttgatgtccagtctacatttgagggtgataacaatgtgctaatgcagcaggtaagcaaagcgctttatgctgaatttttgggtgcacaaaagaagcagcagccattcaaaggattgggtttggga

SEQ ID NO: 17149 - DNA, 401 bp, Zea mays
  Clone ID: LIB84-002-Q1-E1-G12
cccggagcaggtggccgcgtacaccctcaagctcctccaccgccggatccccccctccgtgcccgggatcatgttcctctccggcgggcagtcggaggtggaggcgacgcagaacctcaacgccatgaaccaggggcccaacccgtggcacgtgtccttctcctacgagcgggcgctgcagaacacctgcctcaagacctggggcggccagccggacaaggtcaaggcggcgcaggacgcgctgctgctgcgcgccaaggccaactccctggcgcagctcggcaagtacacctccgacggcgaggccgccgaggccaaagagggaatgttcgtcaagaactacagctactaattaatcgcccggccatcacccggggataccgccgcccctccgagagata

SEQ ID NO: 17150 - DNA, 399 bp, Zea mays
  Clone ID: LIB84-002-Q1-E1-G2
acgcctccgcacttctgtcaactccgttcaaacttctggctgctggtccgcttggaatggccactgtcactgctgggatgtactgtgctggcagatacattactgacatacgagtaaggaaggacgtagcaaaagttgaagtggagaaattatcatcgcaccccggtttccaccttgttgaacatgaagaatcagtcaacaagcgatcagaaaaaccaaagaccttgctccctatgaagaggaaaccacaaacgtgactgcgaagcacagcttacgacgatgaacttctcttcccttcaattggtgtcgaattgtggataacttgggatatgataataagatcggtatagatatgtgccttgccaatgtatcataagtggattaggcgcacccctcacc

SEQ ID NO: 17151 - DNA, 140 bp, Zea mays
  Clone ID: LIB84-002-Q1-E1-G6
ctaaaatgagtcgtattagcttgagcagaacactgagagatcaagattattagcttttgctggagctacggggattgccacagattctgaggagtgatcatctcgcaaggattgcccagttgggggtatttccttgtaaa

SEQ ID NO: 17152 - DNA, 388 bp, Zea mays
  Clone ID: LIB84-002-Q1-E1-G7
cccacgcgtccgacagaacatcgtcctcagcggctacgggaaggccgggcggttggacgacatggagcgagtgctctccgacatgctcgacagcgtgtcatgcaaaccggacgtttggaccatgaacatcatcctcagcctcttcgggaaccggggcgaggttgaactgatggagagatggtacgagaagttccgaggctacggggtcgagccggagacccgcacgctgaacatcctgattggcgcctacgggaagcggcggatgtatgacaagatgtccgcagtcatggagcacatgcgcaagctcgcgttcccgtggacgaccgcgacgtacaacaacgtgatcgaagcatttgctgaggccggcgacgccgggaacatggagcac

SEQ ID NO: 17153 - DNA, 390 bp, Zea mays
  Clone ID: LIB84-002-Q1-E1-H1
atctacttcacctgaacccatggagagtgacaacggcaaaattgccgcggctactggcgacgacttgttagaacagctagaagccctgaagcaacgcttcatggaactcactgcaagctatggcgtgccgcagctcgagaggctgtattccaagataatgaaaggagcaatagagttgacaagtaaagaaagcaacgaggatcataggcggttagtagttaggtatttgtggacattcgttgagaacagcaacaatttttaacctggcgccaataagattcttgttttccttgtacatcctctttggaacgaaacaatagtagccgttcatcttgggagttgtccccgttccatgccttgtgacaaatcttccaaaatgctctactgttc

SEQ ID NO: 17154 - DNA, 134 bp, Zea mays
  Clone ID: LIB84-002-Q1-E1-H12
aacctccccttcagctaatgtacatacccatgcatggggtttcgttttgtgcgcttacttctggcttgccagcgtatggttcaatgtggaaacacatgtattagtacgagaactaatagacttataattaatat

SEQ ID NO: 17155 - DNA, 388 bp, Zea mays
  Clone ID: LIB84-002-Q1-E1-H3
cggacgcgtgggggagtgatcatcaccaatatcattcgctatgttgctggaaacagtgcgctgatttcggctctctcccctgtagcaaatcttgttctgaagagcgtgccccggggggctgcaactacttgttacttggcattgcaccctaatgtcaaaggtgtatctggtaaatacttcgctgattgcaatgaatcaacaccgactgctgtcgcaagagactcagagctggcgaagaggctatggtcgttcagcgaagaacttgtcaagatctatgctgatatgtcacagacgacacaggcaagcgaagaggaggaaaccacggttacgagagacgttttccaagacaagtagcgtaatatatgttgccgcgttttctactttttgt

SEQ ID NO: 17156 - DNA, 416 bp, Zea mays
  Clone ID: LIB84-002-Q1-E1-H4
cggattacatcggcatgctggccactgtgatgaatgctatatttcttcaagcgacgatggagagcatcggaataccgacccgtgtccagactgccttccgtatgtcagaagttgcagaaccatacatacgccgaagagctgtcagacatttagagaaaggaagagttgtcatatttgctgctggaacagggaacccattcttcacgactgatacagctgctgctctccgttgtgccgaaatcaatgcagaggtagtgctgaaagcaacaaatgttgatggtgtgtatgatgcggaccccaggcagaatccaaatgcccgccttctggagactgtgagctatcatgaagttacgacaagagatctctcagtaatggatatgactgctattacactatgccaagaaaacaacattccc

SEQ ID NO: 17157 - DNA, 403 bp, Zea mays
  Clone ID: LIB84-002-Q1-E1-H5
cagtcgaggaggaagaccagtgagcccaatgaggagaacgtcacccttggacccactgtccgtgaaggagagtatgtctttggtgttgctcacatctttgcatccttcaatgacaccttcattcatatcactgatttgtctgggagggaaactctggttcggatgaccggtaccatcctaaaaccttggctgtgcacgacctaggtggcagctgtatatggttttaactgagatgtgctaaacctgaaccctgtatgtggcatgaaggtgaatgctgaccgtgacgagtcgtcaccttacgctgctatgcttgctgctcaagatgtcgcacagcgctgcatggagcttggcattactgcactgcacattaagcttcgtgccaccggaagcaacaagaccaaga

SEQ ID NO: 17158 - DNA, 276 bp, Zea mays
  Clone ID: LIB84-002-Q1-E1-H6
cagtcacattgatgggatccagggccacatcacgagcacggcagcatgaaacaaatcaagtcgtcgctcacctcgaccaacacatctagcgatgacaactagtaggcatccgatgcaagcactggctttgtgttcaattcgacgggcctccagatcatcgaagccgagctcaggcatctcagcacagcagctcgaagacagcggtcaactgcagctgacgcatacctgatgtcgaccaatttcgtgtcgatgtgggctattgaacttcattgctcc

SEQ ID NO: 17159 - DNA, 358 bp, Zea mays
  Clone ID: LIB84-002-Q1-E1-H7
cccacgcgtccgccaggatgcatacgtaaacgccatacggagggcgaagaacttcatctacattgagaatcagtacttccttggaagttcatacggctggaagcccgaaggcatcaagccggaagaaatcggtgctcttcacttgattccgaaggagctctcgctgaagattgtcagcaagattgaagctggggagcggtttactgtttatgttgtggtgccaatgtggcctgagggtgttccagaaagcgcttctgttcaggcaatccttgactggcagaggagaacgatggagatgatgtacactgacatcgcacaagctctcgaagccaacgggattgaagcagacgccaaggac

SEQ ID NO: 17160 - DNA, 363 bp, Zea mays
  Clone ID: LIB84-002-Q1-E1-H8
gactaccacaggcttgctacacccggggaagctgccgcagcaggggcgtccgatcgctgcccccaaaactgtgggacgtatcagtgtcagggtcgctcagagtcgatcgcagcaacagcagcacgtgcccgaagaggaagcccaggcagcaatcgtgctgccgccacaggacgctgcaaatgatgcaacgtaggtggacgtcacagtctccgacacagcagcctttggctgagagcatgatcataatcctcgagtgcagcaggcagtagctgagcagcaccaaacgacacgtccgcatctactcggcgtacatcgatccagtgacgaacactttcaaccagatgcatatggccaagctgatgc

SEQ ID NO: 17161 - DNA, 418 bp, Zea mays
  Clone ID: LIB84-002-Q1-E1-H9
cgacgagatccagagcaaaacgtacatggaggtgaagggcacgggcacggcgaaccagtgcccgaccatcgacggcggcgtggagtcgttcccgttcaaggccggcaagtaccagatgaagaagctgtgcctggagccgacgtccttcaccgtcaaggcggagggcatcgccaagaacgccccgcccgagttccagaagaccaagctcatgacccgcctcacgtacacgctggacgagatcgagggcccgctcgaggtcggctccgacggcacgctcaagttcgaggagaaggacggcatcgactacgccgccgtcaccgtgcagctcccggggggcgagcgcgtgccgttcctcttcaccgtcaagcagctcgtcgccaccgggaagcccgagagcttcggcggggccttcctcgtg

SEQ ID NO: 17162 - DNA, 323 bp, Zea mays
  Clone ID: LIB84-003-Q1-E1-A1
taaggtcacatgggcggcagcggtgggttgtttaagatggcccaaggcttcctcaagtagatattgtctggccaacgtatatacgagtacgtgattagcttcaaaataatgttcccctcgcctttatttgctgttcaagtccctgtaataaccgagaacgttaattgtaacagtgtgttttttatatgattaaaagagaagtgacagaaacagggaaataaagaggaagaactggaagagaagagaaggtagagggccggaaacaagtgagaggaagagaaacaggaaggagacaaaaaagaaggggggggcgccctaagggt

SEQ ID NO: 17163 - DNA, 332 bp, Zea mays
  Clone ID: LIB84-003-Q1-E1-A12
atgataataagccgaacaaagatgacattcagaagcgtagggtaatagtggaagctgaagcaagagaagaaggtgaaatttctgaatcggaggcagagaccaggtatcgtcaggacaaagaggagaagtggcttgaatggtgctctgaagttttagatgaggagcaggaaactttgaagcgcctggataggctgcagaatacaagtgtaaacctcccaaaggaaaaggttctttcaaggattcgcaagtatctcctgataattggggacaaaattggagaagttgtccggcaacacagtgaatcgtataggcaagtcccgcatggtcatgag

SEQ ID NO: 17164 - DNA, 409 bp, Zea mays
  Clone ID: LIB84-003-Q1-E1-A3
tacaccaagagaaattcccagttctttggtccgcgtcagagacgcggcggcgatgtctgggcgcggcaagggcggcaagggtctgggcaagggcggcgcgaagcgccaccggaaggtgctccgcgacaacatccagggcatcaccaagccggcgatccggaggctggctaggaagggtggcgtgaagcgcatctcggggctcatctacgaggagacccgcggcgtgctcaagatctttctcgagaacgtcatccgcgacgccgtcacctacaccgagcacgcgcgccgcaagaccgtgaccgccatggacgtcgtctaagcgctcaagcgccagggacgcaccctctacagcttcggaggctaagctaggctcctcttcatagtccgggactggttaagggacatgtct

SEQ ID NO: 17165 - DNA, 421 bp, Zea mays
  Clone ID: LIB84-003-Q1-E1-A5
accacgcgtccgtcgaagcccaccgaattccctgcgattcctctcccctcgcctcctcgtctccccctaggggatcgtcggagaggaatcgcaaagagggccgtctcatccgagttaaggaagccatggagcacaaggaggctgggtgccaggcccccgagggacccatcctctgcatcaataactgtggcttcttcggcagcgcggcgaccatgaacatgtgctccaagtgccacaaggagatgataacgaagcaggatcaggccaagctggctgcctcctctatcgacagcatcgtgaacggcagcgacgccgtcatggagccggttgttgctggcagcaacacggtagtagctgttgcccaagttgagttgcaaacaatgaacgtgcagcagcccgctgatgttgccggacccagcga

SEQ ID NO: 17166 - DNA, 418 bp, Zea mays
  Clone ID: LIB84-003-Q1-E1-A6
cccacgcgtccgggcttggcttgggactgggccgcccggccgcgaggaataaactcactcctgccttcatacgtatccaatatccatagccgcggcagtacgtgtatgtggttagctatacgcgacctcagctcgggcgcaagctacaacgccgaccaggcgagaagaagcatcgatagtgtgacgagctaacccaccagcagcaacgtaatccaaatccatggacaaccagccgctgccctactccacaggccagccccctgcccccggaggagccccggtggcgggcatgcctggcgcggccggcctcgcagccgtgccgcagcaccacctgctccagcagcagcaggcccagctgcaggcgttctgggcgtaccagcgccaggaggcggagcgcgcgtccgcgtcggacttcaag

SEQ ID NO: 17167 - DNA, 412 bp, Zea mays
  Clone ID: LIB84-003-Q1-E1-A7
ttcatgtaggcctctgatatctggtctcagccaagcagtacaaatttcagacaatgcattgtttcaaactctcataaaaagcaagattctcatacgaatggttacattctcataaatgcaaatggaggtttgaatcaaatgagatttgggatatgtgacatggttgctgttgctaagatcctgaaggcaactctggttcatccttcactcgatcatacatcctactgggcagatgacagtgaatttaaggaccttttcaactggaggcacttcattgagtcactgaaagaagacattgatattgttgaaacacttccccctgaatacagtgacattgaacctttggctaaagctccggtatcttggtcgaaggtgcattattacagagatgaaatcgtcccccttctgaaga

SEQ ID NO: 17168 - DNA, 413 bp, Zea mays
  Clone ID: LIB84-003-Q1-E1-A8
acccgcgccactaccgcctctcacgacctcctctctttcgcgaccacagcaacaaggaggcggctgctcctctccaccgccaccaccaccattgccgccgccatggccgcttcttcctcctgcaaggtcatcgactcccacctgcacgtctgggccacgccacagcatgccaaggaggagtacccgtacttcccaggccaggaacccacgctgcgtggcgacgccgacttcttactcgagtgtatgagtgaagctggagtggacggggctgttattgttcaacctattaatcatatgtttgatcattcgttggtaactagtgtgttgaacaaatacccatccaagttcgttggttgctgttcttcgaaatcctgcagacgatgggactgggattaaacaactttgacatctga

SEQ ID NO: 17169 - DNA, 389 bp, Zea mays
  Clone ID: LIB84-003-Q1-E1-B10
accacgcgtccgtgcggagttgtgtatgctgcagctaggagacaccgggttccccttcctgaagatcctccgtggtggactgtctttgatgctgatgaagcaggaattcaggaagtttgcagggttcttgctcacctctacagcttgcccaaggcccaatacattccagtatataaagacaacgattcctttactgttaagagaatctctgatctacaggcttcaaaggaaagtccagcaagggctgttgctagcgataagggtacccctgtaccctcaagttctagccaggagaaggatccagtggctaagactatactgaacaaggtgaaagaaaaaagtgatgacgaaggtaaaccattgcccgctgaatttgatgggaaagaaaa

SEQ ID NO: 17170 - DNA, 248 bp, Zea mays
  Clone ID: LIB84-003-Q1-E1-B11
ctcccgggtacgacccacgggcccaattccccgctaacactgatcggatgagcaaggagatcacctcccttgcgccaagcagcatgaagatcaacgtcgtcgcgccacctgacaggaactacagtgtctggatatgaaggtcgatcctaacgctcgctcagcactttccaacagaggtagatatcaaagggggagtagcatggggtctggcccggcaatttgtcacaggaagtgcgtccaggtttcgg

SEQ ID NO: 17171 - DNA, 422 bp, Zea mays
  Clone ID: LIB84-003-Q1-E1-B2
atcgttacctcccttcccatcccccactgctcagcagtcagtcagcactcgccacccacacgcctccgctccgcccacgggtccactccaactctccgatctccaggaatccgcggctgaggcgccggcgatggcggctcccatggtcgacgccgaatacctgcgccaggtcgacagggcgcgccgccacctccgcgccctcatctccaacaagggatgcgccccgatcatgctccgcctcgcatggcatgatgctggaacttatgacctgaagacaaaaactggtggtgcaaatggttcgattagatatgaagaagagtacgactcatggttcaaatgctggtttaaagattgctatcgatctccttgagcctatcaaagcaaagaatccaaagataacatatgcagacctgtatcagctt

SEQ ID NO: 17172 - DNA, 421 bp, Zea mays
  Clone ID: LIB84-003-Q1-E1-B5
acccacgcgtccgccgtcatcatccagcccacctccaagaagaccatcaccgagtacggctcccccgaggagttcctctcgcaggtcgactacttgctcggcaagcaggcctacggcggcaataccgactccgagggcgggttcgagaccgacgccgtggccaccgccaacgtgctggagagctccacccccgtggtggacggcaagcagtactacagcatcaccgtgctgaccaggacggcggacggcgacgatggcggcaagcaccagctcatcagcgccaccgtctccgacggcaagctctacatctgtaaggcgcatgccggcgacaagcggtggttcaagggcgccagcaacggcgtcgagaatgccgccgcctccttcagcgtcgcgtgaccgacgtaactattgtttctttgat

SEQ ID NO: 17173 - DNA, 412 bp, Zea mays
  Clone ID: LIB84-003-Q1-E1-B6
aaggaggggatagcatcgtcatcgcaaaatgcaggctctcctgctccccgcgcgggccgcgccgccgacgccggcgatgcttcggcagcgtgcggtttctgcctccgcgtgtgcgtcgcaggtctgccgccccctattcggtgccgccagttgcatctcctgtggggtccacggaagcgttcggcggcacctcacagtggcggtggcggcggccccgccctcgccttcgtcctcaccttcgtcgggaccgctctacccgacgcctccacccaccgagcaggaggtggagagggtcaagctcgagcaggttatgaggagactagagaaaacagcagggtatttcaagaatttgggtaccctggggttctggtcccaattggtgtgcacaattatttctgctggaattttggga

SEQ ID NO: 17174 - DNA, 416 bp, Zea mays
  Clone ID: LIB84-003-Q1-E1-B7
aaacggacgccctttatttttttttttttttttttttttttttttttttttttttttttttttttttttacaaaaaaatgaaatctgatctggacaaaacttgctttgagatcgccaaataatggaaggcatggcactagtttctaccagcccaaaatgctcagaagaacaagattgaatcagaatgtgaccaatatacatgttaatttctgtagccaacaccaaagtgaaatctgcttgcttgcctatcattaaaggcgtactcaagccgtaaaggtcccagaggggagtccacgcggacgccaacaccatagccaaagccactccctggctttccacgagctccggctgggtcaccaggaactttacgaccagaaccaagatcactaccatagtctccaaagaccacgccttcc

SEQ ID NO: 17175 - DNA, 372 bp, Zea mays
  Clone ID: LIB84-003-Q1-E1-B9
aacgaaggctacagcgtcgagcaggagcacttcaagagggaggagaaggagcataagcacaaggagcgcctcggcgaggtgggcgccctcgcgggcggcgcctttgctctgtacgaggggcaccgtgcgaagaaggacccggcgaacgcgcagaggcacaagatcgaggccggcgtggcaacggcggcggcgctgggcgccggcggctacgcgtaccacgagcaccgcgagcagaaggaggcccactacgagagcaggcagcaggagcacagggtgccgcacgggcacgggcacgggtactcctactactgcgactgaaacgactgatcatcccatcgatcgagatatgcatgcagaactccatatatatac

SEQ ID NO: 17176 - DNA, 431 bp, Zea mays
  Clone ID: LIB84-003-Q1-E1-C1
ggtcgacgacgcgtccagtggcaatggcgtcgtccatgctctccgctaccaccgtgccactccagcaggggggcggcctgtccgagttctccgggctcaggagctccgcgtcgctgcccatgcgccggaatgccacctccgacgacttcatgtccgccgtctccttcaggacccacgcggtcggcacgagcggcgggtcgcggcgggcgccgacggaggcgaagctgaaggtggccatcaacgggttcggccgcatcgggcgcaacttcctgcggtgctggcacgggcgcggcgacgcctcgcccctcgacgtcatcgccatcaacgacaccggcggtgtcaagcaggcgtcccacctgctcaagtacgactccacgctcgggcatcttcgacgccgacgtcaagccggtcggtgacaacgccatctccgt

SEQ ID NO: 17177 - DNA, 322 bp, Zea mays
  Clone ID: LIB84-003-Q1-E1-C10
ggcaagcacgttcacgctcagctccagcaatggctgcctccaccatggcgatctcctccactgcgatggccggcacccccatcaaggtgggctccttcggcgagggccgcatcaccatgcgcaagaccgtgggcaagcccaaggtggcggcgtccggcagcccctggtacggccccgaccgcgtcaagtacctcgggcccttctccggcgagcccccgagctacctcaccggcgagttccccggcgactacaggtgggagagcgtcgggctgtccgccgagcccgagaccttttccaagaaccgcgagctggggagtggtcg

SEQ ID NO: 17178 - DNA, 375 bp, Zea mays
  Clone ID: LIB84-003-Q1-E1-C11
ttcgcggtacgacgcacgcgcccatgctacgccaaagcacctctcgtctatttatggaatcccccgatccatgaagccggggcaggccgagagttgtcaacgacgacgtctgccggcagtgctcctgctcctccgcctcctccttcccggccgccgcgcgagcttggtgggttagtgtctcttcttcgcggacacctgtgagaggagccatcatcatggccgccgttgagactgttgtcctcaaggttgctatgtcatgcgagggttgcgcaggggcggtcaaaagagtgctctccaacatgggacgagttgacaccttcaagatagacctcaatgaacagaaggtgacagtcaaagggaatgtcaagcctgagg

SEQ ID NO: 17179 - DNA, 398 bp, Zea mays
  Clone ID: LIB84-003-Q1-E1-C12
ccgggacaacccacgggcccgaacccttttccgagctcctcagttctcgtcatcgtcctcgcgctcagtgtcatttgcagttcccggcagcagccatggcgtcggtgcagctgtctgggccgcgggtggtggcggctgcgaaaccggctgcgttgggcgggctcctcctgacgccgtcccttgcggtgccaaaggggcggataaccaccgggctcgtggtgagggccgccacggtcgtgtcacctaagtatacatccataaaaccattgggagacagagtacttgtgaagatcaacacctctgaggctaaatctgatggagggattttacttccagtatcagttcatacaagaccacaacgacgggaaattgttgccgttgggtcaagggaaaaattt

SEQ ID NO: 17180 - DNA, 422 bp, Zea mays
  Clone ID: LIB84-003-Q1-E1-C3
atgggcagaaggacacagttcgaaagtggttgcgggtttcctggagtcgccaagtacggaggtcaaggatcttgcaaaacctgagttgcagccactggttgatgctggcatccttaaagtgccagaccctaaggttgttcaaaaatgactcgtgcgcgggggcctttttgcgccagtaaatgactcaaggaccatcccttgtttaagggatacggataggttttttgaagctcgttctgccgataaaaattgttaagtcactcgttcgtgtgtacgccagtccgttgtacacttaccctggatatatggtgaatccgataacgttattttgttttaaactcgtaacgctcctttttatctatatttttttgggaaaaaaaaggggtgtttactaaaagaggcgagcaaaaaaaaagggcggg

SEQ ID NO: 17181 - DNA, 414 bp, Zea mays
  Clone ID: LIB84-003-Q1-E1-C5
cccacgcgtccgcccacgcgtccgcccacgcgtccgcggcttcatcatcactccactagccagtcagctactggcctacagctagccgcctcctctcctctcatcccatcccatctcatctccgacaagcgaagcagagcactggcatgagcatggaccgcatggcgcggcgttccgtgtccttgctcctcgctctggctctcctggccgccgcggcgtcggcggactcgtggctgtacgagaagttcacgacggagggcaacgtgcgcgcggactacaacgcgcatgggcagcaggtgacgtctctgatcctgacgcagcagtccggcggcgccttcagctcgcggcagaagtacctgtacggggagttcagcatccagatgaggctgatcccgggcaactccgcgggcaccg

SEQ ID NO: 17182 - DNA, 443 bp, Zea mays
  Clone ID: LIB84-003-Q1-E1-C6
gagtcccgggtcgacgcacaagtccaaaaattcacggatttcacaattgctcattatcttagtgggcccctaagaatagttgattctgaaggggttccagcttcaccaggtgatcttctcgcggtagaaatctgcaaccttggcccacttcctggcgacgagtggggttacaccgcaatacttgaaagggagaatggaggtggattcttaactgaccacttccctagcgcaagaaaagccatctggtatttcgaaggaatctacgcatgctccccgcagataccaggtgttcgttttccaggattgactcatcctggtgttgtgggaactgcaccgtcacttgagctcctaaatatatggaatgaaagagagaaaagtttgtctgagacaagcccggagacgattaaactgtgtgaagttctacaccagaggccccttgctca

SEQ ID NO: 17183 - DNA, 429 bp, Zea mays
  Clone ID: LIB84-003-Q1-E1-C8
gcaaacctccaaacaggcacgtcgacgtcacacgggcgctgcacacagacacaccaagcgtcggcaccaatggcttactaccaggaggtggactactgctcggaggaggtgaggtcggtggccccggccggcttcggccgccacggcggcggcgtccagcagcacgtcgtcaaggagaagttcgaggaggtcgacacggtcgcacgcgccggcgccaagcaccaccaccaccatggtcaccacggcggccacggcttcgtggtgcgcgagaccagggtcgaggaggacatcaacacctgcaccggcgaggtccacgagcgcacggagagcttcctcgccacggctaactgagcagcccgggcggccggcatccacgcccgttcgtgcctgcctgcgtgccttacgtatgttcgtgattgtgcacggtca

SEQ ID NO: 17184 - DNA, 200 bp, Zea mays
  Clone ID: LIB84-003-Q1-E1-D12
gagcccgagtgaacgggcgaggtctggacgagatgcagagtcgtcgtgaactacgctgacagcggaagaccaccaccctcgatgtcgagagcagcgacaccatcgacaatgtcaaggccaacatccagtccagggaatggatcccgccggaccagcaaccgctggatcttggccggaagcaggtgcaggatcggcgcacc

SEQ ID NO: 17185 - DNA, 424 bp, Zea mays
  Clone ID: LIB84-003-Q1-E1-D2
ggccgcattcgacaacccgctggaccacctgccgctcttcccctacttcaccaactacctcctgctgagccagctggagcacggcctgctggcgcgccacgtcccgggcccgcccccctcccgcgtcgccttcgtcggctccggcccgctcccgctcagctccctcgtgctcgcctcgcgccacctccccgccgccgccttcgacaactacgacatctgcggggacgccaacgaccgcgcgcgccgcctcgtgcgcgccgacgccgcgctcgccgcgcgcatggcgttccgcacctccgacgtcgcccacgtcacccgggaactggccgcctacgacgtcgtcttcctggcggcgctcgtgggcatggccgccgaggagaaggcgcgcgtcgtcgagcacctcgggaggcacatggcgcccggg

SEQ ID NO: 17186 - DNA, 387 bp, Zea mays
  Clone ID: LIB84-003-Q1-E1-D3
aggcgaccgcgtacggtaagctcgacgacaagccggccgggcagtacgtcgagaaggccgaggggtacctgaaggagttcagcgcgggacacgccaccgagcaggagcagcctgcggcggcagcaggcgacgacgcggcgcccaagccaccggcgccggaggcgcccaaggagccggcggcggtgcctgcgccggccgcggaggaaggcagcaagtcgtcggaaggcttcggcctcggcgacgtcatgaagggcgccgagcagctggtgggagggaagcagcagggcggcggggaggagagcgccggcggccgtgggctgtttaagatggcccagggcttcctcaagtggatatattgtctggccaacgtacgtgtactcgtgtagt

SEQ ID NO: 17187 - DNA, 420 bp, Zea mays
  Clone ID: LIB84-003-Q1-E1-D4
agggcgtggagcggtcctcgccgcagtcggagatcaaggcggcgtaccggtcgctgcagaagcggtgccacccggacgtggccggcgccgccggcggccacgacatggccgtcgtcctcaacgaggtgtacgcgctgctctccgacccggacgcgcgcctggcctacgaccaggagcaggcgcgccgctccgagttcgccggctacacgggccgcccgctctactcctcctgggtcggcgccgagtccgagcgccgggcggtgttcgtcgacgaggtgcgctgcgtcggctgcctcaagtgcgcgctccacgcgtcccggaccttcgccgtcgagtccgtctactgccgcgcccgcgccgtcgcgcagtgggccgacgacgaggacaggatcgtcgacgccatcaacacctgccccgtcg

SEQ ID NO: 17188 - DNA, 408 bp, Zea mays
  Clone ID: LIB84-003-Q1-E1-D5
agtgagtcgtactacctgccgcacgtcatctccgaggcgccgccgttccccggcgtgcgccacgtgggcggggacatgttcgcgtccgtgcccgccggcgacgccatcgtcatgaagtggatcctccacgactggagcgacgcgcactgcgccacgctgcgcaagaactgctacgacgcgctgccggaaaatggcaaggtcatcgtcgtcgagtgcgtgctgccggtcaacacggaggccacccccagtgcccatggcgtcttccacgtcgacaggatcatgctcgcgcacaagcccgagcgcaacgagcggtaccagcgcgagttccgctagctcgggtagggcgcccgcttcaccgggttcacggccaccgacgtgtaggcgaacgcctgggccagccgagttcag

SEQ ID NO: 17189 - DNA, 182 bp, Zea mays
  Clone ID: LIB84-003-Q1-E1-D6
aatagtcgtcgcgttagcaggcagatctgagttagccggcggatccgatccgtgcgcgtgcagtgtacgtgtgtcggtggagatggccacagcttacgctcccatggcgagccaggtgatgaagagcagcctcgtcgtgcactcgaggccgaggggcctgtcaggcgctgctgcgctcacga

SEQ ID NO: 17190 - DNA, 106 bp, Zea mays
  Clone ID: LIB84-003-Q1-E1-D7
cccgggtcgacgcacaactccaaaacagcgtccggtcatgggcacgctcgccatgcacctcatcctgtgctcctcctcgccatctcagcaccgccggcgccccttg

SEQ ID NO: 17191 - DNA, 424 bp, Zea mays
  Clone ID: LIB84-003-Q1-E1-E1
gtcagtcagcttcagcaccacgagcacgatggccctcgcgctcgccacgaccccactcgcgcatctcgcccttgccccgccctcgatcttcggctcccagtcctcgctgctgctgctcccgcgccgcgcgtcgcccgcccccgtctccctctcccaccgccgcatcatcgcggccgtcgcgaccaaggaacccgagctcggcggcggcggatcgggggccggcgacggtgccggagggagcggcggcggcagcgaccccaggggaggagggcaggaacgagaccgggaggaagagaagatggggcagggcctgtccatgtcgcacaaactcaccctcgcctacgccgcgctcgtcggagctggtggtgtaatgggatatatgaatagtgggagccagaaatccttggctgcatgaggcatatca

SEQ ID NO: 17192 - DNA, 352 bp, Zea mays
  Clone ID: LIB84-003-Q1-E1-E10
agaaagaggagcacggacaaggcagagcgccatcgttcggtttccttgctgaattcccgatcgctcgctcgctcgaaaagaaagaagctagcttttagcatggcgtctctggcgttcggcagcaccgtagcggcggccgtggcggcgacatcggggaggacgcggccggcgcgccggtccgtgctggtcgtgccgcccgctgccagcaggggcggcccggcgccggccaaggaggagaagggcctcggcgagaccatcttcggcttcatcttcaagaaggaccagctggtggagacggacccgctcctcaacaaggtcggcgccgcgccggccgccgcctcccgcgccaaga

SEQ ID NO: 17193 - DNA, 241 bp, Zea mays
  Clone ID: LIB84-003-Q1-E1-E11
acgcgtctactcaggcgtcgggaggagctcggacaaggcagagcgccatcggtcggtttccgtgctgaattcccgatcgctcgctcgctcgagaagaaagaagctagcttttagcatggcgtctctggcgttcggcagcaccgtagcggcgggcgtgggggcgacatcggggaggacgcggccggtgcgccggtccgtgctggtcgtgccgcccgctgcgaggaggggcggcccggcgccg

SEQ ID NO: 17194 - DNA, 297 bp, Zea mays
  Clone ID: LIB84-003-Q1-E1-E12
aaagacgcgtggacggacgcgtgggcaattttagagcactgagcagagcacacatggactagtattctaagatgtacggtggacgtctattttgcactgacaaatttagaagtattctaccaaaaaaaaaaaaaaaaaaaaaaaaaagaaaaaagaaaaaaaaaaaaacaagaaaaggagagaaaacaaaaatgaaaagacaaaaaaaaaaggggggacgcgcgatatctaaaataaggccgcaaaaccaacccagttctacgggtctcccgcgttgcggggcaagccgggaaaagg

SEQ ID NO: 17195 - DNA, 422 bp, Zea mays
  Clone ID: LIB84-003-Q1-E1-E2
aaggtcaagtgggttattcgttacacgctgcagaagcatgcgcttagtcgttatttgcagacgataataagtagatcgatggagtagtgatcgagcaacacacacgtgacgacgtttgctcttatttacttacacgcacgcacgtgtacggcgctaggggccgtatatatatcgagttctgcatgcatatcgcgatcgatgggatgatcagtcgtttcagtcgcagtagtaggagtagccgtgcccgtgcccgtgcccgtgcggcaccctgtgctcctgctgcctgctctcgtagtgggcctccttctgctcgcggggctcgtgggtacggcgtagccgcgggcgcgcagcgccgccgccgttgctacgccgggctcgatcttgtgcctctgcgcgtgcgccggggtcggtcttcgcaaggg

SEQ ID NO: 17196 - DNA, 422 bp, Zea mays
  Clone ID: LIB84-003-Q1-E1-E3
gcaagactctaaagtgagtcatactaatcaacccagccatggccaaggcagctcctcctctcctcgccgccggcagccgcactgccatcacagcgcagcagccatcgtcgaggaaaggcgccgctggcgcaggtttgttctgcagtcgcgtcatcgtcagcaagcgcgccagggtaacagcgaagctcggagacggagagctgaagcctgcaggcaagcggaagttcatcagcaaggaagaggagccagaacagtactggcagaccgcgggggagagggagggcgagaatcccatgatgacacccctgccctacatcatcatcttcggcatgtccacccccttcgtcatcctcgccatcgccttcgccaatggctggatcaaggtccctgttcgatgaccgtgacgcgaaagccagtctgga

SEQ ID NO: 17197 - DNA, 415 bp, Zea mays
  Clone ID: LIB84-003-Q1-E1-E4
aacactgcactgcacaacgcaacctcctcccctcaactacagggaaatcagccatgagtgcgtcgtcggcgaagccagccaccggcggcaagacgtcgtggccggaggtggtcgggctgagcgtcgaggaagccaagaaggtgattctggcggacaagccgaacgccgacatcgtggtgctgcccaccaccacgcaggcggtgacctccgactttgggttcgaccgtgtccgcgtcttcgtcgggaccgtcgcccagacgccccatgttggctaggctagagcctcagcctagaggtcgtcggcaccgccgggcatgaccacctgctatatgtcactactagtaataaagtataaataacagggaggatgcatgctcatccttgggatcaaaaaaaaagaaaaaaggcggccgct

SEQ ID NO: 17198 - DNA, 418 bp, Zea mays
  Clone ID: LIB84-003-Q1-E1-E5
accacgcgtccggaggaagaagcgagagagctgacaagaatcgactgccatcaatggctctggcgccggcgcctctccagtgcttcctcacgagcagcagaccggccgtatgcacggcgacgccgcccaataagcgcgcgaggaggccgtcgaggatctcgtgcagggcgtccggcgatgacaaggacaaggtcccgtcgtcgggagggagcgatcttggggtcaagcagctcgggaagctggccatggtcgcgctgggcgccggcgtgctggtgctcggccccgtcgacggtgccgtggcgggcaagtccggcgggagggtcggggggcaggcgttccggtccgcgctccggtcgtccggccctcggatcaacaactcgaggaccagcatctacatcaagccgccggtggcgccgcc

SEQ ID NO: 17199 - DNA, 317 bp, Zea mays
  Clone ID: LIB84-003-Q1-E1-E6
ctcgtaggacgacgcaaaactctacaatgagtcgtcataaattaatcatcccggttcagccctctcctggcgcggcgtcgtcgtcggcctcggcctcggtgctcaacggcgccgtggactggtggcgcgaggtcaaggagtcacggctgtggcaggaccgcatcttcgagacgctcgccgtgctctacggcagcgtctccgccgtcgcgctggtccagttgatcagaatcgagtgcagggttccagagtatgcgtggaggaggcagaaagtgttcgatctcgtagccgtcctcgtgaagggcgtgaggtctgccgtg

SEQ ID NO: 17200 - DNA, 388 bp, Zea mays
  Clone ID: LIB84-003-Q1-E1-E7
acacgcgtccgcccacgcgtccgaaaaaggaaaggaaaggacaaaggagcggcggcgaggtctatggcgtcgacggcggggtacctggcgcggcgggcggcgcagaaggagcgggtgcgcctgctctaccgcacggcgctcaaggacacactcaactgggccgtccaccgccacctcttctaccaggacgcgtcggatctccgggacaagttcgaggccaaccgacacgtggataacctggacgtggtcgataggctcatcgacgatgcggaggctcagtacaggaacttccagcaccccgatccctacattgttccatgggcaccaggcggcactaaattcacaagaaacccccctccacctcaagggatccagatcatctacaatt

SEQ ID NO: 17201 - DNA, 378 bp, Zea mays
  Clone ID: LIB84-003-Q1-E1-E8
aggacgcgtgggcatttaggccgacagagtcgctgtagtgaattcagctcgtgttagctcctggctaacgagcagaccatatggctttagttttgtggaagtgggcgcgatttcgtcatgtcatgcatgtgttagctcctggctaacctgcaaatgcgtgtgttggtgcaggtttttgtcacgtctgcgtcagctcctggctgaccagcagttgtttgtcgttcattctctgcgtcagctcctggctgaccagcagttatttgttgtgcattcttgcgctagcaccaggctaggctgcaaaactgcaaatatttgttgcatggaacattgtaaatatcagtcaattcccattctgtttgttcaaagccgagtgcgttt

SEQ ID NO: 17202 - DNA, 357 bp, Zea mays
  Clone ID: LIB84-003-Q1-E1-E9
gacgcacgggcccaacacgcacttcaacgctccgcgacgccgcaacctctcaccgccggtccccgccctccgaccctccacgcgcaaatagcgcgcctccatccactaggaggatccccgatgagctatgagaagtgttgatttggatattcgtggagtgtgcaatggtggactttgttcgaccgctcgcctctgccctgctcaagtgctgcgaccttgacatacccaatcggccaaagggcctcgatgaccccgaacgcctggctagagaaactgtttttaatgtgaatgaaatcgatgctctgtatgagctgttcaacaacattagcagtgctgtgggtgatgatggcttgatta

SEQ ID NO: 17203 - DNA, 421 bp, Zea mays
  Clone ID: LIB84-003-Q1-E1-F1
accacaagtccgcggacgcgtgggcaaagacgcctcatgatcgtgtccctttgaaggaaatgaaatcagattggcatgcttgcctggacaacaaagttgggttcaagggttttgcagtgccaaaggagcagcaggataaggttgtcaaatttgactttcatgggcagccagcagaaatcaagcatggtagtgttgttatagcatcaataactagctgcacaaacacctcaaatcctagtgttatgcttggtgctggtcttgtagctaagaaagcttgcgagttgggtcttgaggttaaaccatgggtgaagacaagccttgcccctggatcaggagttgtcacaaagtacttgcttcagagtggtcttcaagaatacctcaagcagcaaggattccatatcgttggctatggctgtaccac

SEQ ID NO: 17204 - DNA, 401 bp, Zea mays
  Clone ID: LIB84-003-Q1-E1-F10
tcgcgggacgacgcaagcctctaaagtgacgtcgtactaacgcgtgagtgaagtcgcatagttcactcttgcagcgggacgatagagacttcatacaccttaaggttcatacaacgagcaggtgtatgaagtctcatagtacactcttgccgcggtccgatagagagtccacttcacttaggttgatttaatttacgccggatgcagacctaagtcaaggtacgtcctccattgagagactttgggattgttcctacatagatcatgggatgagagggcaatcagaggacatggagccatctgaagatctttccctaacgagacagtatggcgagttagctgatcgttacattaggtgatgatagagccgaatgcagaaaaatgcatgttgggtctttgaa

SEQ ID NO: 17205 - DNA, 357 bp, Zea mays
  Clone ID: LIB84-003-Q1-E1-F11
gcgcgggacgacgcaagcccctacagtgactcgcagtaaggacgccgccgcagcagccgaccaggagccggccccggcggccaccaagacggccaccgcggacgacgacttcgaggagcgcgtgctacggatcaagtcccgcgtcgggcccaagaagcgcggcgcgcgcaagaagaaggccgcggcgtccgcgtcagccagcgccgtgacgctcccgcccgtgccgctgcgggagccccggtcggcgctcggcgcgcccgtcgagcgcggcttcaccgcgtacagcgagcgggtcaacggcgcgcgggccgcggctggggctcggcgcggtgctgctcgtggaggcgggcgccgggc

SEQ ID NO: 17206 - DNA, 337 bp, Zea mays
  Clone ID: LIB84-003-Q1-E1-F12
tcgcgggacgacgcacgcgtctaaacagagtcgaaatacagaccatatccttccacttgctatggcggcggcggcggctacggcgaccacgacctctccggcgagggcttcgtggcggtctacggttcccgcgagctcgggatcgggagcaggagtctgcttccgtgttggagcgaagcgcttcagtccagggctcctaacggcaagcacctgtcggcaccgacaccgaggcagaacaaggctcacagcagctcacatcagtagcggggaagccggtgggcgtccaagcacggaggagagcgcaactggcatcggtggcgcggacgaggattccttg

SEQ ID NO: 17207 - DNA, 421 bp, Zea mays
  Clone ID: LIB84-003-Q1-E1-F3
aaacagcacatggtggtaccatggagcgcggagaatcttctggcatgcatgcgaattcaaagccacgaagatctcatgttgatgatgatcttgatgagcatccaaagcgtactcgggtagaagatattgaccaatatagtgaagaatattctgagtgatgaactgataaatcataattatcttgcaccaacgaatttgatcagtacatgtgaagccgtcaaggcataagtggttttatggtgcatggtgatgcagtgaaagagaatagctggcagtgggaggacatcatggcttggccagtttcttaagggcagagtatgtgaagcaaagctgagtgtaaccagacttcaagactttgatctctgtagtgatcagagaaagtatcacattgttgtaaagaagttttgcctttaaagtcttg

SEQ ID NO: 17208 - DNA, 400 bp, Zea mays
  Clone ID: LIB84-003-Q1-E1-F4
gatggaacatgaccaaaacatggcattttctttctgcaagatgaaacgaatggattgtgttcatacaataataatatatataacgggctgtacaggacaacagaatttgctgttttcacccagatctacagacagcgtgactgaagtttggatttcaattcttgctgacggcagtcttgcaaactgggcaaatgttcttctgcgagagccactgcttgatgcagtacacatggtagctatggccacagtctagccttcccatctcttcatttgtttcaaattcctcttggcaaatgctgcattttctttccatttctgttgcgaaccgtaaggaactgaaggatgggtgcttgaacttcctaacgttgcgagtaatctcgtcgtcacgtaaccctggtgt

SEQ ID NO: 17209 - DNA, 411 bp, Zea mays
  Clone ID: LIB84-003-Q1-E1-F5
aggacgcgtgggtgcgagctcaaccgcgccgaactgccaagccagtggccgacatgctctgtcctcactgtccctgctcgttcccctgctgcaagttgtcgggcaacctgcagctcggacttcaccatcggctctttgcgtgctccgctgcaccagatcgccgcgtcaccgtgaagctacatgccttgccttgcgttgcctttcgctgctgctgtagccgagtcgtcatcgcccaagtgctgagcgctctgaacttgccagcgttctgcagccctgccgtcgactctctactcgtctcgctatgttgtcatagttcactatcctcgtcctcgccgtctaccttgccggttcgtagttgactgttatttatttagaacggttggccgagtacttagttttagtggtgtcgtc

SEQ ID NO: 17210 - DNA, 378 bp, Zea mays
  Clone ID: LIB84-003-Q1-E1-F6
agccgctgctcgcgatggccggacgcggaggaggtagcaagagtagcctgtacgcggcgctgggcgtggccagcgactgctccgacgccgagctgcgcagcgcctaccgcaagctcgccatgaaatggcacccggacaagtgcgccggcgcagggagctccggcggcggcgcggacgccgccaaggccaggttccagaagatccagggagcgtacgccggtaactaatccgctttccattttgaatcatactcgactctacgcgttacttttgcttgtaggttgggtagctctttttaagagaattgtcatgtatgtacgtacacgtagtcgtcggccaagtatattttgcagcttgcacttatttggtgatgtgggt

SEQ ID NO: 17211 - DNA, 418 bp, Zea mays
  Clone ID: LIB84-003-Q1-E1-F7
actcgttgcccaccgtcggcatggtcgtcccctacggcgccttcttcgtccctgccggctccgggaacgccggcggcgggacctacgcgaaggacaagctgggcaacgacatcacggtggaggcgtggctcaacacgcacggtcccaacgaccgcacgctcgcgcaggggctcaagggtgaccccacgtacctggtggtggagcaggacaagacgctggccacctacgggatcaacgccgtgtgcactcacctcggctgcgtcgtgccgtggaacggcgctgagaacaagttcatctgcccctgccacggatcccagtacaacaaccagggcaaggtggtccctggaccggcgcctctgtcgctgggcctggttcacgccgccgtccacgacggcaaagtcctcctcgtcccgtgggt

SEQ ID NO: 17212 - DNA, 403 bp, Zea mays
  Clone ID: LIB84-003-Q1-E1-F8
acggacgcgtgggcgaaaaaaaaagatgaacagggagggagagaggaaaaagatgaacatgacaggacctcgtcgctaaaaccctagcgcagcggcgcgggagcggatgcaccttgccctgatcatctcccgcattcgcctcttgccgaccgccatgcccagcacccgctccgcctccgcctccaggctgctggtccgcgctgacaacagcccagttgcacgagaaatcaaacgtgaatccagtgtttcttttgacactccgaagcccgaagcaactgtctctgttaagcggagaagggtgaatcgagaacttgaagtaaatgggcagcatcataagaatcaggtccctgacattgaggattttatatatgaaaaggccaagacattgacatcgtcaagtaaa

SEQ ID NO: 17213 - DNA, 378 bp, Zea mays
  Clone ID: LIB84-003-Q1-E1-F9
tcgcgggacgacgcacggccctaaagactgtcgaaatattcaggaacttgtcaccccatgttcaagcttgcgtgccagatctcctgaacgttgctctaaattgcattgacaatgttagagatactgatgggaccttgcgcgctgtcaaatcaaagatcgcaaaccttgtagcaagcaacataagccggaattggccacaggatttgtatcataaggtggcacagtgcatatgaagtggcttgtgtgttgagttgatcaggaatctggactaatctgtatcagaactctgaagctttcaaacaatatggttgtcatcccatcctgtgtttaatgtgtgtcaaatggtacgatgtttatttttacaaaaagaaatttcca

SEQ ID NO: 17214 - DNA, 395 bp, Zea mays
  Clone ID: LIB84-003-Q1-E1-G1
atagcaaacctgtcgaatgtagatgggtggtggagttcaatcggggaccaattgccgtactcagtcatgtgtatcatgagggttctctcctgggctttaatggccttggctgtggccaaaatgaacgggagacaaggcaccacttgaactccgtgccttgataaacatcgagcatctcgtcgccctcatccatgctgaccatcatcttgtcgtcctcgtccatgctgctgacgcgcaagcgctgctggatgtcagtgttcatgcgcctggcgaatgtgctgtgcgccgcaaacttcctccctgaaacgggctgcgaaattgggaatttggagcgccaggaaacttccgtgattaggtcaactccaagtctccgcttgttgaatcccactaacaga

SEQ ID NO: 17215 - DNA, 394 bp, Zea mays
  Clone ID: LIB84-003-Q1-E1-G10
acgcgtccgagcagaatcatcatacaactcccaaggtccaaagcccacccgtactcatccgcgatccccaaccatggccgtcggcgacgtggagacggcggcgccgctgctgcccccgcgggcctctgccctggcggacgagccctccgcgggcccgcccccagacgaccggctcggcatcggctacctcatcttcttcaccctgggcgccggcttcctgctcccctggaacgccttcatcaccgccttcaattacttcgacttcctcaacccgggggcccccgtcgaccgcgtgttctccatatcctacatggtctccgccttactgcccctgctcgtcatcgtgctcttcttccccaattcgagggcccccattcgggtcaacacgggggtc

SEQ ID NO: 17216 - DNA, 393 bp, Zea mays
  Clone ID: LIB84-003-Q1-E1-G11
agcttgtcacagcgcaaaacacacatgcttttgtcctggatggacgggttcacccggagcgaggcgtcgctggccaacgccgtggcggggcagcccgtggccgtgtccatcgaggccggcggcgacaacttccagcactacaagaagggagtgtacaacgggccctgcgggaccaacctcaaacacggcgtcaccgtcgtcggctacggccaggaggcggccggcggcgacaggtactgaatcgtcaagaactcgtgggggcacgggtggggcgacggcggatacatcatgatgaagaaagacgtcgccggcaagccggaggggctctgcggcatcgccatccgcccggcctatccactaatgtgacatggtggtgtgcaactgttttccgtt

SEQ ID NO: 17217 - DNA, 341 bp, Zea mays
  Clone ID: LIB84-003-Q1-E1-G12
accgccgtcgctccacgcgtacgagccggccacgacctgccttctcgccacgcgtgcgccgctcctccccctgctggccgcctccatctttatcctgaacgccctcttctcgccggcccgcgcgaagcggagccgtctcggcgagaccgtcacggatacgcccgcgggctcggcgatggccatcatcgttgagcggcacgcccgggccgaggttgggtgaccgtcctgggcacggtgaccgagccgttgagcccgcgcacgggcaccggacggtggttcagctggtgctggggcggcgggcgcggccggcaggggaccgagcggtccagctgggacccggc

SEQ ID NO: 17218 - DNA, 426 bp, Zea mays
  Clone ID: LIB84-003-Q1-E1-G2
taaccacgacgtccgtacgtacgtagatcgatccatcgatcgctagctagctgacgaccatggcgtccctctcctctgccgccatcaccgccctttccttcacggccgcgcccgctcgcgcagtggtcagcaggaggtccttcaccgtgcgtgcctctctccgcaaggccactgccaccgccgccgtggccgttgccgccagcgtcctgcttgccggcggcggcgccatggcccacgaggtgctgctgggcgcaggcgacggcgggctcgtcttcgagcccagccagttcaccgtcaaggccggcgacaccatcaccttcaagaacaacgccggcttcccgcacaacgtcgtgttcgacgaagacgaggtgcccagcggcgtcgacgcctccaagatctcgcatgaggggtacctcaacgcgccag

SEQ ID NO: 17219 - DNA, 420 bp, Zea mays
  Clone ID: LIB84-003-Q1-E1-G3
accacgagtccgcccacgcgtccgagcgactcccgtagctggaactcgctcgtcaaaaggaaaagaaacacttcgcttcagctggttgacagacgactcagagcaaaatgggtatactggtgattacggtggacctagactgctgtcgctgcagagccaagatcaccaaggtcctggactgtctcaaagaggagttctgcatcgagaaagtggagttcgatgacaagaaggagaagaaggtggtggtggtgcgtgggaagttcgacgccgagaagctctgcaagaaggtgtggtccaaggccgggaaaatcgtgaaagggattgtcatcgctgaggtgtggccaataccagccccgcccaaggagtgcaagcctgaggcaccgaaatgttgcgactgtgagaagtgcaagccgaagccta

SEQ ID NO: 17220 - DNA, 424 bp, Zea mays
  Clone ID: LIB84-003-Q1-E1-G4
aaaaagaaacaatagtctcagaaccatctagagacagcggcccgtggagcggacagcggagcgagcaagcctgcgccgccgccggcgtcctcccgaagtagaagctgttctgatccacagctctcgattccggaaggagttggtcaagaactggggatcctgagttgaatatgatatcaaatccggtggactggtatagtttcggacccggatagaattggtagggatgccagattggagggtgcgtgagtttgaaggtaaattcactgatgagtttgcccacagtaacaacaacaaacatgaaagtggagttgaggctcctggtgtcactagtagtaagaagttgaagcatgcagttgccggtgagaaaattcaaggtgtcatccctggaatagatagctcagatccacagaaatgtaattca

SEQ ID NO: 17221 - DNA, 441 bp, Zea mays
  Clone ID: LIB84-003-Q1-E1-G5
actcgcgggtcgacgcacgcctctgaacgctctcctgcgacctccgcgtcgtcgacctccccacttcgccatccatgacgccgcagttctacacctcctccgtcgtccccatcggcgcgctctacgcgatgtcgctctggttctccaactcagcctacatctacctgtccgtgtcattcatccagatgctcaaggcgctgatgcccgtcgccgtctactccatcggcgtcctcttcaagaaggagaccttcaggtcctcctccatgctcaacatgctctccatctcattcggtgtggccatcgccgcctacggcgaggcgcgcttcgacgtgcgcggtgtcgcgctgcagctcgccgccgtcgccttcgaggccacgcggctcgtgctcatccatatcctgctcacgtccaagggcatctcgctcaaccctatcacctcgc

SEQ ID NO: 17222 - DNA, 415 bp, Zea mays
  Clone ID: LIB84-003-Q1-E1-G8
aatctgaggatgtgggcgagctcagccgccaatgcgctcaagctctcggcgggcggcggcggagcccgggctgctgctgccggcccggccttctctatctccaggttcttctccactgttcacgatgggttgaagtacactcagtctcacgaatgggtcaagacgacgggcgacgtcgccaccgttggcatcacggaccatgctcagggccacctgtgagaggtggtgttcgtggagctgccggaacccggcacgaaggtcgccgcgggaggacccttcgggaacgttgagagtgtcaaggccaccagcgacgtcaactccccgatctccggcgaggtcgtctaagtcaatgccaaactgtcaagagacgcccgtgcctgatcagcacaagcccgtacgaggacgggtgggtgat

SEQ ID NO: 17223 - DNA, 429 bp, Zea mays
  Clone ID: LIB84-003-Q1-E1-H1
tcaccacgcgtctagatctcggtctcggactacggttgagcgaagtcgtcactgtaatctacggatctgcaattggcggaggcggaggcaacggtggggcaactgatccggtacccgtacgggggcacttcgtgctccaaccttgcccgcatcgctctcaatctcaaaggtgtggattacaagtacaaggcggtgaaccttctcaagggcgagcagtctgatccagaattcgtcaagcttaatcctatgaagttcgtccctgcgttggttgatggcagttctgtaataggtgactcttacgcgataacactgtatttggaggacaagtacccagagcctcctcttctacctcaagaccttcaaaagaaagctttgaatcaccagattgcaagcattgtagcttctggtattcaacctctccataacctc

SEQ ID NO: 17224 - DNA, 407 bp, Zea mays
  Clone ID: LIB84-003-Q1-E1-H10
atctaaccccattgaaaaatgaaattggattttcgggagaattttggaataaaagataaataaagaattgaatttgaaaaaaaaaaaaaaaattctttctatttcggattcggattatttcttttttaataggatggatttcatcctctttttggagcaaattttaactcattgtattccatatggaataagaggagaagaaaagcattccacgacccccgaggggccccctcaaaaagggaactattcctaaaatttacttttttttatttatttttattcgttttttgaaccccaacaaaagtggattcaaagttacttcaattatccttttcttttaagttcttcttgtaaagttccatgcttgctgtttggtcaagaaaattagacctaatccaagaaagaag

SEQ ID NO: 17225 - DNA, 403 bp, Zea mays
  Clone ID: LIB84-003-Q1-E1-H11
gggacaacgcacgcgtccgaacctccaccaatatggtgtccccatcagtgctagagatattctttcagatctaaagctcaaagagagtgttaaagcatacagtaactggcctacgtttccacagatatttatcagaggagagttcgttgggggatctgatatcatactcaccatgcaccagaagggtgaactgaaggaactgcttggcgatattgcacaaaaagccgaacaaagtggttcttcatgaaacaagcatcagtatttgtgatgcaaacttcccggactggatgttccttctcagaagattttaggtgatcgtgcattgttgccctgtggcttcggatttgaatacgttctctgttttgttcggttcggttgctgccagttgttgatggaagatcca

SEQ ID NO: 17226 - DNA, 174 bp, Zea mays
  Clone ID: LIB84-003-Q1-E1-H2
taaagtcactcggggtcactgccagggctactgcaactactaccactccgtctttgtagacatgttttacagcgctgttccgctcgcttcgtggctatatgcaaatgcaagtgttgtacggagtactaaactcatacgtggcaaaagatgaataaagacttaaacatttcttcg

SEQ ID NO: 17227 - DNA, 112 bp, Zea mays
  Clone ID: LIB84-003-Q1-E1-H3
taaacgcatcatgcctagctctcataacgttgtcgttgtgtacgtaaatgcctcttgtagcctgaatgtcaggcgcccggattcatgaatctattttattgttgtattcctt

SEQ ID NO: 17228 - DNA, 415 bp, Zea mays
  Clone ID: LIB84-003-Q1-E1-H4
cccacgagtccgagcgccactgtccagtgcgcgcgtcaagcttgcttagctagccgccatggcctccctcgccgccgtctccgtgaagcccgtggccatcaagggtctcgccggcagctccatctccggaaggaagctcgccgtcgccaggccgtcggcccgctccatccgcaggccccgcgcagccgccgtggtggccaagtacggcgacaagagcgtctactttgacctcgacgacatcggcaacaccaccggacagtgggacctctacggctctgacgcgccctcgccctagaacccgcgacagagcaagttcttcgagacgttcgcggctccgttcaccaggagaggtctgctgctcaagttcctgctgctgggcggcggctcacgtctgggctaagtcagcgccgtcggc

SEQ ID NO: 17229 - DNA, 267 bp, Zea mays
  Clone ID: LIB84-003-Q1-E1-H5
aagacacgtgggcaacagcgccgactacgacgcgctcggctgcctcaagaagttcaacgacctctccaccaaccacaacgcccagttgcaggcccagatctccgccctccagggcaagtgcaagtcggcgcgcatcatgtacgccgacttctagtccgccgtctacgacatggtcaagaaccccggcaactacgggttcagctcggtgttccaagcgtgctgcggctcgcggggcgggaagtacaactaccgagacagcgcgcggtg

SEQ ID NO: 17230 - DNA, 341 bp, Zea mays
  Clone ID: LIB84-003-Q1-E1-H6
tcccgggtcgacgcaaacgtccagttagctccgcattcgaaggccagattccaagcaggtgaataataacagatggttgcgagtaggaccacatcgaagccaagagatacatgtcgcacagatgggaggatcaatattatcctttttttatttctttataaccaaacaccttggagtactttgacacaaggggtgtgttcacagtgggatctccccagtttcttgaatgcagaaccgtatccgttgtatttgttccttcttgtcgtgagtgtaaatctagcgtgtccgaaattcggttttagattgtaggtgtgactgtagcagggattatctggtgttaa

SEQ ID NO: 17231 - DNA, 425 bp, Zea mays
  Clone ID: LIB84-003-Q1-E1-H8
aaatagtttacagaaatcttattctatacacacatatatacatacgcagcacctatatttacatagaccagagtccagatatctgttctgtacagaggagtaggacacccacagcatgaacttcctccttccctcacaagacacgagatcactcaccaagagaagaagctccacagctcatgctagtatgctacagtacataccaccaaatccatctcctaaagattttttttaaaaagaatcctaactccaagaacaagtaatacgaggtactggtggtgcggcggtgggcatgcagtgcaccagctcatacggtagaccgtagtagtacaacgccgacaggccggcggtgggcacggcgatcgatcaccagcagcccgtaagccgcgcaggggcacttgccctttgatcagctgacgccgcgg

SEQ ID NO: 17232 - DNA, 379 bp, Zea mays
  Clone ID: LIB84-004-Q1-E1-A1
cggcgaattcagcttcaccgccccgatacattcgcgcactgcatgtctgaggatcacttcctcgccgtggttcgtgctattcgccaagagctccggtcagcattattcgcagaggattctcacataacaattgtctccatcacacaggtcaactcgatttggtcaccgacaacggcacagtttgctaagacctcatcttcatatcacctcccgtatcacttcccaggatccatattgatgctggaggaagagtccacagggcattcagggtatgcctgagttcatcgacgactcaacgttgatcgtcaatcacgacttacgaatcactaagctcttccatagtttcccatcatgatgtgtcaccgttagtctcaccatt

SEQ ID NO: 17233 - DNA, 412 bp, Zea mays
  Clone ID: LIB84-004-Q1-E1-A10
gctaaagctctgatggagtccattaagaatattacaaaacttgaggtgcccaatctacaaaaaaatattcccaacagtgagatgcaatgtagactaactcgcttgccaagtagtcttctgccaggattgaacttgggcatttggaatggtggtcactagtttgttaaagtcgcaaatctgtgggcaaatcggatatctcctgatcctcctcatctgccaagcaaccccacctcttcaatgaacaatgcagcaacacacagccagtcatgctgaataacatgtcatacatctgatgctgtgacctacactctgatggaagcatcaaatgcatgttgtgtaaaacatattcgtcaagttatcgtttttatatacgtaaactgatcaagcaccgtgctgattgagggctgttctt

SEQ ID NO: 17234 - DNA, 348 bp, Zea mays
  Clone ID: LIB84-004-Q1-E1-A11
acccacacgtccgctcacgcgtctgcccacgcgtccgcccactcgtctgcgaggcgtggctggtccgagtcgcatcaccgccgtacaacggcgatggcaagcataaccagaatcacgctgccgagtgcggctcgtgcagacgggccctgagcgcgtagcagtatcgctgcgtgacgtgcgcctcggagttgcacccccgctgcctggtgccggaggtacaacagtgccgcagcgccagcgagggctatgccgggcgcgcgggttccgcgggcagtagctgctgcttcgggctggtagacgacctgacgcgccgcttgggaacgccaggcaccggtcgtcaatagcgtg

SEQ ID NO: 17235 - DNA, 427 bp, Zea mays
  Clone ID: LIB84-004-Q1-E1-A12
ataggctccgtacaaccagtggctatcttggagctgaatgtcaagaagctatggactcctcattctcaaacatcgcatcatatgaaacaccaagttcagcacgtgggaatagacagcaaatatttatggagtctccagttggcttgagaccacatcttccagctgagaggaaatgggctcttggtcttcagtctcgagcacatccaaaagaaataatgtctgaagtgctgaaagctctgcaagaattaaatgtttactggaaaaagataggtcactataacatgaagtgcagatggagtcctggctttcctgctcaaattcataacaatcataacttcagtgcagggtccattgaaactgataacctgagtgagaggttaagtttaattaagtttggaattcagctgtgcaaagcaagagacgagaa

SEQ ID NO: 17236 - DNA, 390 bp, Zea mays
  Clone ID: LIB84-004-Q1-E1-A4
cgtcagctcacgcgtccgcccaagcgaccgtgttatgccttcaagtggtgccgtcaattgtcaatgtacttgtgacatattaggttgtccatgatgtgtgatgactacagatatggaaatcagactgatgatttgcgttttcagctcatatttttgatcgccttgtcgaagttgtgttttttatcgcaggcatagtagatatcaagatatgacagcgggtccattgatcaccatgacatctctggcatcaggtcctaaaatttgttgctggctcgcttccatggtcagatttcggctgtaaatcttaatgatcatttcctcaaggcttcagttgatgtctacttcatacatgagatgttccattatttttgcacttagttcggtactatg

SEQ ID NO: 17237 - DNA, 409 bp, Zea mays
  Clone ID: LIB84-004-Q1-E1-A5
cccacgcgtccgggaatggttaagggctatagcggtgttttccgacttggagaagccacatcaacctgggatgcagattcaccaattatccagagggaaccatgggaacacatcaaagatgaaaatattagaaaggcagcagcatcattcatgggttggcggtgaaaagatgtatgacaaagcaaggaagggtgaaacagtagagctttcaccaagacgtatatcgatataccaatttgatattgagcgcagtttggaagacagacagaatttgatatttcgagttacttgctcaaaaggaacatacattcggtccctatgtgcggacttgggtaaagcacttggaagctgtgctcatttaactgccttgcggagagactcgataggtgaatactcggtcaatgatgct

SEQ ID NO: 17238 - DNA, 405 bp, Zea mays
  Clone ID: LIB84-004-Q1-E1-A6
gtgggcacagaggtccgacagggtgttcttgacaatagagctgcccgacgccaaggatgtgaagcttaacttgaagcctgaaggccatttcaacttctcagctaagggctcagatgacttgccctatgagtttgacattgagctgtttgatgctgtgaatgtggaggagagcaaagcagctgttgccccaaggaccatatgctacctgataaagaaagctaagagcgggtggtggccaaggctgctgaagcaggagggcaagccacctgtgttcttgaaggttgactgggacaaatggcaggacgatgatgatgaagatgctggatttaataactttggtgatatggacttctcgaaactggacataagaggtgctgatgacgacgatattggggatgatgaaga

SEQ ID NO: 17239 - DNA, 417 bp, Zea mays
  Clone ID: LIB84-004-Q1-E1-A8
ggagcataaccacacggagcgcctcggcgaggtgggcgccctcgcgggcggcgcctttgctctgtaccaggggcaccgtgcgaagaaggacccggcgaacgcgcagaggcacaagatccaggccggcgtggcaacggcggcggcgctgggcgccggcggctacgcgtaccacgagcaccgcgagcagaaggaggcccactacgagagcaggcagcaggagcacagggtgccgcacgggcacgggcacggctactcctactactgcgactgaaacgactgatcatcccatcgatcgagatatgcatgcagaactcgatatatatacggcccctagcgccgtacacgtgcgtgcgtgtaagtaaataagagcaaacgtcgtcacgtgtgtgttgctcgatcactactccatcgatctac

SEQ ID NO: 17240 - DNA, 419 bp, Zea mays
  Clone ID: LIB84-004-Q1-E1-A9
agcacattcaaattgaccaattgctactagtgctataactttattccgaatggataacttcctttcgaaaagactaaactgaataattatgtcaaagttgtttcactagtttggcctaataggtattgatctatggtatctagactgcaggttgtactatagggttgattgttctgattttgggcttggttaatctaacatttctagcatccaaacatatagatatatgtcagctacctgtgtaccctgcacgaataatcctataaatccaggttgaatattttctgcatgtaacctaaaacttctacgctatggtctttcacttacaggttgtcaaagaagagcacatgtgctaatttggttgggctaaaattatatagaaaagagtgttgccttgggctacgagtctaaaactatat

SEQ ID NO: 17241 - DNA, 394 bp, Zea mays
  Clone ID: LIB84-004-Q1-E1-B1
atttctgcacatttgtggtgaacagaatcttgagactggcatgttagccaccattggggacctgaagaccgtctcggattgctcagaattttactatactgataccaaaaaatacagtaactcatattggtaacggcgtaaggcataattcgtttttcgtattcgctcgatcaatgcaatacgacaagggttttgtttttgtctcacgtctcattgtcctagctacgcccataacacaaggtatcattcctcatgttgtatataatatcatcgtggatgaatgaaacacttttggacttttttttttgcgtacgagattcttaggcaccgtttgtttttggtcagaatgacttcactgagccttccatagaagacaatattcataactggggaa

SEQ ID NO: 17242 - DNA, 78 bp, Zea mays
  Clone ID: LIB84-004-Q1-E1-B11
ctcgcgggtcgacacaagcctctacagtcactcggggtcaagtcgttcaacctcggcggcatggggtgcaacgccggt

SEQ ID NO: 17243 - DNA, 422 bp, Zea mays
  Clone ID: LIB84-004-Q1-E1-B12
cccacgcgtccgattggatattacgagccactggtttcaaatgtacagttctttcttgtcaggtaagactagccacaaggatgtaaaacacacaggcaattggcttctgaaattatattatgggtacaggccattcatggccttctgctgtgtttcttgtgaggttttatatattttcctgtttctctttgctgatgaggagtcaacaagcttgcttagtgtatgcaaaggcatcctgaaccaaagtcccgtcgttatcttggtgtttgtttccactctagttggctgggcagtgaagcaagccaccaacgtcatccagatgaaaactgctgcggacgcatgcgtggtgtatgatctgaagcgcagcaaatgaagcatgaaggcagcttcacggtttagtatcgacatatccaagggaaaac

SEQ ID NO: 17244 - DNA, 417 bp, Zea mays
  Clone ID: LIB84-004-Q1-E1-B2
aattttgtattttcaattttattattttttttttatgtttttttttttattatttttgatttgtttacttctttatttttcatttttttattatttttaaaagaactaaacaccgtccccaataattttcaccacaagggagaatacatcatacacaacagcggggtgaaggttcaattaaaaaggacttcttcatcaaatttctctaattgtaacagtccagttccaatccttccgcctaaaccaaaagccaggtttcccacgtacgaagactggcacaatccccatcgaggatttgcaatcaaccgtgcatcagccaatagaacccgaggtccttgtcatcgacgacaaagtcacccttcaaaaccccacagtaagccgcaacgggccaaaaaaaaaccccggggaagaggcggc

SEQ ID NO: 17245 - DNA, 420 bp, Zea mays
  Clone ID: LIB84-004-Q1-E1-B4
cgggctctgggagaggcgacgctctcgggtgcaagtgcctcttcgggctcggggtgccggagctcgccgtcatcgccggcgtcgccgcgctcgtgttcgggcccaagcagctccccgagatcggccgcagcctcggcaagaccgtcaagagcttccaggaggcggctaaggagttcgaaagtgaactgaagaaagagcctggggaaggtggcgatcagcccccacctgcaacccccacggcaacgggggtaggtggcgcggagaaggggcttgaggcatcaagtagcaaggagagcacgtgaggatctatcaagtgttgttagtgttgttggtgtaaaattgtattctggtcttctggagttagcatcaagttcatgtcctttttaaccacgtcgcgggttcaggccattgtagcgatat

SEQ ID NO: 17246 - DNA, 420 bp, Zea mays
  Clone ID: LIB84-004-Q1-E1-B6
accacgcgtccgcgcaagcactccacactgctgtgcagaacgagagccacaccatcagtagttagagcgaccaatagatgagttcctccccgtcctttggtctcctggctgtagcagcattactcctagcactgagcttagcacaacatggctccctcgccgcaaccgtcggccccagggtcatcgtcgtcggcgccggcatgtctgggatctcggcggcgaagaggctgtcggcggccgggataaccgacctgctgattctggaagcgacggatcacatcggcgggcggatgcacaagacgaacttcgccggcatcaacgtcgagttaggcgccaactgggtggagggcgtgaacggcggcaagatgaagcccatctggcccatcgtcaactccaccctcaagctccgcaacttccgct

SEQ ID NO: 17247 - DNA, 415 bp, Zea mays
  Clone ID: LIB84-004-Q1-E1-B7
agaagatgcacacctacacgatatcatccatcacgttgatcatgacaatgatggtcggatctactacaactattttgtgacaatgacgcagaaaggaaatatcccactagggaacttggggcactgccagatgagctttggtcttagataagcactgaaacttggctaagtagaatgatcaatccagtgtgtagtgccattcggcttcatatgccaactttagctgctgagactaagtccgtcaaattgggacgccgatacctacagtggttcatatgcgcggtacgacaacctttgggagaccaactaatcagtcagcatgcaggatcacattggagatccatcgtcgtaaacctcacatgtacatggcttatttgaggtaggataggaatcactgttgtgtttcacatagtca

SEQ ID NO: 17248 - DNA, 394 bp, Zea mays
  Clone ID: LIB84-004-Q1-E1-C1
acctttttattttttttttttttttttttttttttttttttttttttttttttttttttttttttttttaaccaactcggctagagtcgccttcctaagcgtttctaatttacagttccagtaaacacaactgaagccgcgtgtcttccgttttattaacgattagatgcattattatatgcaagttaatgcaatatagatactgctttccacgcacccaattctccgaataatatgcattcacagtaaaaacaacaatctccgagcaacaaaaacctttaaaaacgtactcatgaccgtgtcacttgtaggcgtggatgtaatcttgaaagtataagttcttcgggcttaagttggcaagccaatgggaggcagcaaagcacagcacggggcg

SEQ ID NO: 17249 - DNA, 365 bp, Zea mays
  Clone ID: LIB84-004-Q1-E1-C10
atcgaatacaatgcttccagtgctcgataaaatcggttcaacctgtcccaaacacaatgccatcatgctggcagtctaaaactgccaactcccagtcccaaacgctcaagctgtatcaggagcggtgactttggggtaatcggagtgcgactgaacctcccactccgtccaggacccatcgtagactggcacatcacgctttccgatcctgtacagccccagagcgagtatgcaagcaatcacgccggttccgcaagtcacgacgatgggtcgcgtccatcgagattcctgcgtgctgaaacttccgccgcagctcgtcggcggggaggagaaggctccgtggtgcgccgtctaaaatctcgggg

SEQ ID NO: 17250 - DNA, 396 bp, Zea mays
  Clone ID: LIB84-004-Q1-E1-C11
aaggacgcgtgggtgtttacttaactgccgttctgtcaaagatacaagaaggggggtggttgccgctggctttctcatcactgtttctctgcataatgtacacatggaactacggaagtgtactgaagtaccagagcgagatgcgcggcaagatatccctggacttcattcttgatctgggagccacacttggcaccgtaagagttccaggcattggactcgtgtacaacgagctggtccagggaatcccatcgatctttggccagctattagtcacacttccagcgatgcactctacaattgtctttgtttgcataaagtatgttcctgtcccttatgtccctcttgaagaaaggttcttgttccgaagggttgggcacaacgactaccacatgt

SEQ ID NO: 17251 - DNA, 417 bp, Zea mays
  Clone ID: LIB84-004-Q1-E1-C2
aggttctgagttcgtgggcgagagggaagagatggcggcgtcggacgttgagtaccgttgcttcgttggcggcctcgcctgggccaccgacgaccactccctcaacaacgccttcagcacctacggcgaggtcctcgagtcgaagatcatcctggatcgggagacgcagaggtcccgcggcttcggcttcgtcaccttctccacggaggacgcgatgcgcagcgccatcgaaggcatgaacggcaatgagctcgacgggcgcaacatcaccgttaacgagggccagtcgcgctgcggacgtggatgccgcggtggcggatacggtggcgggcgccgtgatggaggcggctacggcggtggcggtggatgctacggcggtggtcgttgaggctacggcggcggtgggggatacggtgg

SEQ ID NO: 17252 - DNA, 418 bp, Zea mays
  Clone ID: LIB84-004-Q1-E1-C4
gcggcagcttcgaccccctcggcctggccgacgaccccgaggccttcgccgagctcaaggtgaaggagctcaagaacggccgcctcgccatgttttccatgttcggcttcttcgtccaggccatcgtcaccggcaagggcccgctcgagaacctcgctgaccacatcgctgacccagtcaacaacaacgcatgggcctacgccaccaacttcgtccccggcaactaagctcaacggctatgctatgcaacttcattgtctttcggatcggagagggtgtacgtacgtggattgattgatgctgcgagatgcatgtgtgtcttttgtttcacgttgcattgcataggcaagtcgagatgatgagttggcgttgtacactaagatgaaccatgtttgtgcaatagtggtggtttttgttt

SEQ ID NO: 17253 - DNA, 405 bp, Zea mays
  Clone ID: LIB84-004-Q1-E1-C5
aacacatgtccgaccacgcgtccggtttgacatagtttgtcagtgacctattcctggttggactgttctaacaacagtataaccagattgctacaaacaccttggcgcgagtggctcttctgacacatgcagtctgcaatgtgtagaaacgtgttcttgtcatcagattctcaatcatttgcttttggcaacagacttaacatacattgtggcattggcacctcgattgtcataactgatgtcgctacgtcctccttacattaacgctaagattgacgacgacacaaggaacaagagcgcattactgctgtgaatacaaatctcgagaccttccatggacagaatatcgtctactatcacgacctacgtctatagcttgtattgttctcaccttgaatcagtcag

SEQ ID NO: 17254 - DNA, 418 bp, Zea mays
  Clone ID: LIB84-004-Q1-E1-C6
gatgaacatctgcctaaagctcccacagctcggtttttcctcttactgggatggttcttcatcatcacaggagtaatactgcttgttagttcaacccgattgattgcgcgtctacctaggtctgttcagaagtatttgaagagcaacatagagcgcacccacagcatcaggaggcctggttcagcacgagggaaggatcccatcccaacaacaacgatccatacgtcgtcactacacttgcttgcttctccaacaaaggagaaggcctagaaaaatgttggcactagagcaacttcgtttgggcacctcacgtttgccatgttattgattgattgaatggttccgtgaacgtagtctagagtagcatcttaaaagcttgggttggttattcaccatactgccctttataggtctaaca

SEQ ID NO: 17255 - DNA, 420 bp, Zea mays
  Clone ID: LIB84-004-Q1-E1-C7
ggttccgtccccgatccgatccgccgagtgcacaccacctttccccactccgatcgaatcgatggccgccgagggcgagaagaagatgataaccctcaaaagctccgatggcgaggagttcgaggtggaagaggcggtggcgatggagtcgcagaccatccgccacatgatcgacgatgactgcgccgacaacggcatcactcgtcctaacgtcaactccaagatcctatccaacgtaatcgagtactgcatcacgcacgtacatgccgccgcagccgcagccgccgcctctaatgccggttccgacgacgtgggtgccgcctccgccaacagcaccgccgcctccggtgaagacctcaggaactgggatgctgacttcgtcaaggtcgaccaggccacgcttttcgacctcatcttggg

SEQ ID NO: 17256 - DNA, 417 bp, Zea mays
  Clone ID: LIB84-004-Q1-E1-C8
cccacgcgtccgcggacgcgtgggcgctctcaaggtggaggtcctcgtggtcattggccatatctgctgcggtggcatcagggcgctcctctccctccaggacggcgcacctgacaccttccacttcgtcgaggactgggttaagatcggcttcattgccaagatgaaggtaaagaatgagcacgcctcggtgccgttcgatgaccagtgctccattctcgagaaggaggccgtgaacgtgtccctggagaacctcatgacctaccccttcgtcaaggaatggcttgcacatgggaccctcaagctgatctgcggccactacgactttgtctcaggagagttcctcacatggaacacgtgaaatgctacggctaaggcagttctaccggcccgccgactcctgcattatcataaata

SEQ ID NO: 17257 - DNA, 360 bp, Zea mays
  Clone ID: LIB84-004-Q1-E1-C9
acccacgcgtccgcccacgcgtccgcgcagaaccgcgatttcctccttggctgcatcgccctgtatgtggtgctgaatgtggtgctgctgatccttagctacaccattgagaaggatgccatcctattcacgcaccctcctatgggttctttcagcaacactggtctcactatttcctctaaattaccaagattctcggacatgtacactctcacaatatcaactgcggatccacagtcaatctctgcaaacaagccagttcatttcactaagagcgtcacaaactggtttacaatggaatgagttcttgtggagggcctgttctggtaggatgtcgcgaagctgattgatgactacaac

SEQ ID NO: 17258 - DNA, 424 bp, Zea mays
  Clone ID: LIB84-004-Q1-E1-D1
aaacacgtcgaagtcgtcgtagttttacgtgctcccgtccgtcccgtgcgccatggcacgcagcaacgccttgatgtggttgttgcttctcgcgctctcgtgctggtcgtggtgcggcgccgtcacggcgcggccgaccccgagcaccagcaccagcaccaccacagccggcggcggcttcatcaggtcgtggtgtgcggggacggactacccggccctgtgcaacgcgacgctggccccgtacgcggcggaggtcggggccagccccgcgcgcctgtcgctggcggcgctgacggtcacgctggacggcgcgcggagggcgacggccgcgatgaaggcgatggcggcgggcggcgcgagcagccaccacctcgtgcccgtggcggccgaggcggccgcggactgcgtgggcatgctcgaggac

SEQ ID NO: 17259 - DNA, 394 bp, Zea mays
  Clone ID: LIB84-004-Q1-E1-D11
aaggacgcgtgggcggacgcgtgggcgaccggcgactttggccccggcccccgggctaggaagcgagttcaccggtggatccgcgcgtggccctccctgttgcctgcgggcgctggccgttggccaggtcgccccagccggccaccccccgcccccgcaccctgctgacttgggcttgctgtatagcacggaccagatcaagggtcgccgtcgaccacatttgaggcttggccatgcctttaaatatagatattgatctgttcaagctggatattgatgagctgatagctgattattccaatgagaactgtacgtcactctttgaattcaaacgagtatggatgggcaagaaattttcgtatagctatgaacgcagacctaagacagactcggg

SEQ ID NO: 17260 - DNA, 430 bp, Zea mays
  Clone ID: LIB84-004-Q1-E1-D12
tacacacacgttctggcatcgagcaggagcacttcaagagggaggagaaggagcataagcacaacgagcgcctcggcgaggtgggcgccctcgcgggcggcgcctttgctctgtacgaggggcaccgtgcgaagaaggacccggcgaacgcgcagaggcacaagatcgaggccggcgtggcaacggcggcggcgctgggcgccggcggctacgcgtaccacgagcaccgcgagcagaacgaggcccactacgagatcaggcagcaggagcacagggtgccgcacgggcacgggcacgggcacggctactcctactactgcgactgaaacgactgatcatcccatcgatcgagatatgcatgcagaactcgatatatatacggcccctaacgccgtacacgtgcgtgcgtgtaagttcataagagcaaacg

SEQ ID NO: 17261 - DNA, 422 bp, Zea mays
  Clone ID: LIB84-004-Q1-E1-D2
ggagcagcagctgggttcatggccggcgagggatcctcgtcgaggagcacttcccaggccgagaacgagagccagttccgggacctgatgaacacgctcgcagcttccgggagcggagctgctggcacagcgttcagcgggggtttcccgggcatggacgacagcaagctgagcacgagagacttcctcggcgtcggcggcggcgtcctgcggagcatgggtggcgcggcagggctgccgctgcggcacggtgccgcgggcattggcatgggctcattggacacagaaatgaagtaggtgaatcgaaatccgaaacgagcattattatgctccactcttgggctcttgcattgcatgcaaggtaagtagtagcagcctaagcaaacgacctatggaaagatgagaccattttcgcgcaaaat

SEQ ID NO: 17262 - DNA, 421 bp, Zea mays
  Clone ID: LIB84-004-Q1-E1-D3
accacgcatccgcccacgcgtccgtggcttgggaaccgtcaaattcgttgcaattgggcaacgaaaggtgctaatgctggtgaagagaaacagattctggacactaaggttgacctgtcaaatggttcatcagaatctggaaaagagaatccaaatgaatatggtcctgaaaataaccctcagtttactactgtttatgttggcaatcttcctcacgaggctaccatgaatgatgtgcacctgtttttccattcactgggggctggttcaattgaggaagtccgtgtaactcgtgataaaggctttggctttgtgaggtacagcacccatgaggaggctgcattggcaattcagatgggtaatggccaacttattggcgggaggcagataaagtgttcctggggaagcaagccgactccac

SEQ ID NO: 17263 - DNA, 356 bp, Zea mays
  Clone ID: LIB84-004-Q1-E1-D5
accacgcgtccggggacctcaccaagggagtcgttggaattggcgatgatcacggcggggaggggatggacgtctgtacatatgcaacgaccacggaaggagcgaggcttggtgatcagtaccacacgagcatagctccatgtgcggagctgaaagacaaggggatttgtttgttccccttttccgtgctgctgcactaccatgggccaaactgaggaaaaaaacaatatgcgaatgaacagcatatgtagtgtttcgcaacttacactctatgcgcgcatgcatgtgtggtatgaacgaatgcaagaagaatgtgatactgtggatagatatatgtttttccttaatgaggatat

SEQ ID NO: 17264 - DNA, 419 bp, Zea mays
  Clone ID: LIB84-004-Q1-E1-D7
acacagttcacaaaggtgggggcgaaaacatccatttgttcggtatgggttaccactcatttccttgacagtgtttggtgcagtgggacttgctcaccttatacagggcagcaaagacgtgaccaaggtaaaggaggatatggaatgggaggttgtacagacaacacaagctctaagtcgaacacggccagtggaacgagcctataagcctaagaaactctctctagaggacgaactgaaagctttgcaccagaaggttgacataaacagctacgactacaagcccatcccaagacccagtgagaaataagtgtagatgaagaccgtttgctagtgcgtcgagtggatgtttgtatcttgatacttacgtcgtcacgtcttgtcacaagttttgtatgaatgtaccgagctgattcaag

SEQ ID NO: 17265 - DNA, 418 bp, Zea mays
  Clone ID: LIB84-004-Q1-E1-D8
caaattttgaggcttgtcagttctgacctattggacataagcaagagaaatgcatgtgttgtgtgtttgacagtgtctttgaaaatcacacctccagaaatttgtgatttcgaagcgtcgaagggacaggtccagaaaaaaggggagattgttaaaattccattacttgggagtgaccgcacgaactatggtaatgttgccatgttgctccaactatgttctaaagattccatggcgtggctaagcaaaactgctgcacaaaaaggaaacagaatttgactggacgtctgaatatcttcccttcagtctgagctccagaccagagtgcaaaaagaaacattgaaccaatggaaaaatgaataaaagaacaatcagtaactacagtgcatgtctgaagattctcatgggcgtgggcatc

SEQ ID NO: 17266 - DNA, 401 bp, Zea mays
  Clone ID: LIB84-004-Q1-E1-D9
tctcgggtcgacgcatacgtccgagatgatgcgccacacgcgtcgagcactcttaactcatgggacacgatcgccatggccgccacatcgaccgccgccgccgtactgtgccgaccgtcagtggccgggctccgccaggcgccgactcccgaacggacgcgcgtgtcgatccgcgcggcacctgcaccggcacggcggtccgtggcggcacacgcggagctcagcacggcactagcaatcatccagagacaaggcgtgtcgctcttcctgtgccgatgcgtcgcacttcaacatccagtcggagaacatggcgaagcaggtgcccgcgcacaacggcaggacacacgtcgagtccgatgacgagcgcgccaaggagttcgccgcactgcacaagtccaacg

SEQ ID NO: 17267 - DNA, 370 bp, Zea mays
  Clone ID: LIB84-004-Q1-E1-E10
ggaaaaatggcactctggttggagccattccaaaagaaattaaaggcccactatatcctaccattgcagttcatagttacggtgaagagtaagcttttacttttttagttgtttaggcgacatagaattgctatatggtgtaagttgtgattcaccccaggtcttccaaccttagttgcagaaacatctggcagacttggataataatacctgctccaaaatgcaatttactcatttgtttttttgcgtgttatatgatggttttcctttctagcacgacatagaaagtcacaagttgtgcacctcaatagtaacacaagttaatcactccctgtttaattcttagacataactttagttgtaggttctc

SEQ ID NO: 17268 - DNA, 414 bp, Zea mays
  Clone ID: LIB84-004-Q1-E1-E11
agagggcgactacgaccacagcgtcgcggacatcatcagcaacgcgtcctgcacgaccaactgcctcgcgccattcgtcaagatcttggacgaggagttcggaattgtcaaggggaccatgacgacgacgcactcgtacaccggcgaccagaggctgctggacgcgtcccaccgcgacctccggcgggcccgcgcggcggcgctgaacatcgtgccgacgagcacgggcgccgccaaggccgtggcgctggtgctgccgcagctgaaggggaagctgaacggcatcgcgctgcgggtgccgaccccgaacgtgtccgtggtggacctggtgatcaacaccgtgaagactggcatcacggccgacgacgtgaacgctgggttccgcaaggccgccgccggcccgctgcaaggcat

SEQ ID NO: 17269 - DNA, 388 bp, Zea mays
  Clone ID: LIB84-004-Q1-E1-E12
cacctccgttcctccctcacgccggcggcctgtatccctctccccatggctgctggactgggagcgcgcccctccgccaccttcgaggccggaaggttccggcctctcgctgcccctctccgccccgtccgctccggaaaattcgtagtgcctaagcgatgcttcactgtgtcaagtaggcttgcatgggtggaagatgagcttatggagataaaaaagtcacaagagcaaagttcagtaaaatcagagaaaagaccacctttgaggcgtggaaaggtctccccacaacttcctgtaccagggcacattccaagaccatcttatgttggttcaaaaggattgccacaactatgcaagggccaattacacgatgctcaaggaattgctg

SEQ ID NO: 17270 - DNA, 153 bp, Zea mays
  Clone ID: LIB84-004-Q1-E1-E2
tgctattcgctcgctcaatggcagcttcccttctcattacctcaaggcccatgaccaattccacactaaccacccatgacaagccccacatgttgggagcattctgcgcaccggatgataatcagcagcaactcatctcggaggccgctttgc

SEQ ID NO: 17271 - DNA, 424 bp, Zea mays
  Clone ID: LIB84-004-Q1-E1-E3
aatggatgtggctaaaaaggcattgatcctggctaggcttcttgggcaacagataagcatggagagtatcaacgtatgcctgtctgttgagagtttatatcctagtgaattaggacctgatgcagtgtccacaaaggacttccttgaaagtggtttagtgcaacttgacaagagcatggaagaaagaatcagagcagcatcttcgagaggaaacgttcttcgctacgtctgtgagattgaaagcgcagggtgccaagtaggccttaaagagctcccaaaggattctgcgctgggtacattgaggggaagtgacaatgtggtcgagatatacagcagatgttaccagagctcccctctggtgatccagggcgcaggagctggcaacgacaccactgccgccggcgtccttgctgacataatcgac

SEQ ID NO: 17272 - DNA, 413 bp, Zea mays
  Clone ID: LIB84-004-Q1-E1-E4
ggcagattgtgaagaacaacaactccttcctggtgaagcagtttggcaacggcaatgccaaggtgcagttcaccaaggagcccaacaacctctacaagtttacactcctacaagtactctggcttagcaaacaagaaaactgtaacgatccagccagctgctggaaaggactcggctgtggtcctctctactaccacgaccaagaagcagagcacacccgcgaagctcagccacaagtctgtgatgcgcaaggagttccgcacgatggccaatgctgtgaaaaaccaggttggcgacaactattacaggcctgatctgaccaagtcggcccttggtaggctgagctctgtgtaacgcagcctccatgttgccaagtctggtgtcaagaccaagaacaggcagcctacgcacta

SEQ ID NO: 17273 - DNA, 146 bp, Zea mays
  Clone ID: LIB84-004-Q1-E1-E5
aagtctgtaccctgtacgacgtgactcgaaaaatgaacctatggatgtacatgcaacagtcctccagctgttgtgttcatttgttttgttcaatatgggccatggccaccaaaacaagatctgaattgtaactgttattaaccttc

SEQ ID NO: 17274 - DNA, 427 bp, Zea mays
  Clone ID: LIB84-004-Q1-E1-E6
tcgggtccacgcatacgtccgcttcggtgatgaataacggttgccctttggatggtgcggttcgtatcgtacgtttcggcggcgatactgtgtatccatggtgcgatgcattccccgccacgccatcagccacgtcagggatgaggataggagctactacgctcacatcgcgggttcgcaccacttcgccagcggtagcatcgatgcactgatgccggagctggcgcgggccaccaccagcactgacaccctcttccactcgaccctgatccaggtacgacagtctaacttgtgctcggatgttctcagactagctatcggagaccaaggaggattcagggatgtcgaccatcatggtactggagcgctggtataactgctgggaggtttcatggcagcctgtctgcacctgcaccgacgctcattg

SEQ ID NO: 17275 - DNA, 371 bp, Zea mays
  Clone ID: LIB84-004-Q1-E1-E7
tcgggtccacgcatacgtccgataacatccgctcgagtgggcgtgcataagccgatataatgcactctgcacggcacatggatgggctgatctccactgagatcacaggattcatggtgggtggcctgctgctcagctccagcatctctgctcccaaagtcgacggcttcatcgcttcctcccaaagaaggtcactagggatatgtaagaggtgcggtgaccttcggattgtaccatgtccgcagtgcaatggaacaggatcagctcggcgctgcgggatgctcactttgggcgtgcaggatgatctcgacgagtctcatgtagccgaagccactactgataatctggttccttgcacaaagtgcaggtcg

SEQ ID NO: 17276 - DNA, 380 bp, Zea mays
  Clone ID: LIB84-004-Q1-E1-E9
gacacaacacaggtacttaaaatttaaggagatatcattgtcgattacacacgataatttgtctgctaaaaaatataggaaacagtacttgtagatgataaaaaaaaaagccaaaacttgcagcagtttgacaaaaacagcagctctagtcgtcgaagaggctgaagcccatttcctcgtccgactcctcttcaggctccgcagccttctcttcttccttgggagcagctgcagcgccagagtccccagcagcaaccggggcggcaacagcaaacttgcttgggtccttgaggtactccttgatcttgtcagcatgtgggtacgagtagtctgtctcgacagcaacagcaagcacattcttgctagttctaagatcgcga

SEQ ID NO: 17277 - DNA, 349 bp, Zea mays
  Clone ID: LIB84-004-Q1-E1-F10
acggacgcgtgggcgaaagagaagctctcggcgatcgccgaccttggcgtcggtatcgagaacaagatagctctcaagttcgacactgtgttttggcccgacgttgaagtgataggtagggtggccccgacgtcaaacgcctgtggctactttctcaaccttaacaaagccacaggaaacccggtcctggtgtgcatggtggccggaaggttcgcgtacgagatcgagaagctgtcggacgaagagtccgtgaacttcgtgatgtcccagctcacgaacatgctgccgcaggcaactgacccggttcagtatctggtctcgcgctggggtagtgaccccaactcacttg

SEQ ID NO: 17278 - DNA, 279 bp, Zea mays
  Clone ID: LIB84-004-Q1-E1-F11
aataggtcgacgggataggctttgtcgaaaccctcttcaacagtggaggtattgatggtgatcggcgaccgtgagcttccatgtgattgcgttctgacacgtgagacttttattatgactatgtatgagatattgtcttttagtagtactggatgacgatatgtgtgagacgtttgtgatgtgagtgacgacactaaggatgagacttttgtgatgtaattgatgagactatcggtttatatattgttatgtgattgtgtgtgagatgttttatgcgag

SEQ ID NO: 17279 - DNA, 99 bp, Zea mays
  Clone ID: LIB84-004-Q1-E1-F12
atcgggtatgccgtaccaactcatcatctgccgttgatgtccccaacagaccgtatcaattccccgccgccgtgcccatctctagatccgaaccgacaa

SEQ ID NO: 17280 - DNA, 97 bp, Zea mays
  Clone ID: LIB84-004-Q1-E1-F2
gtcgacacatccgtccgaacagatacgtataaggattcggccgttaacgaacaggatgtgaacaaggatatcatggcttcatcaaaagtatgcctca

SEQ ID NO: 17281 - DNA, 322 bp, Zea mays
  Clone ID: LIB84-004-Q1-E1-F3
gatatccggtagccgacattcattgcgcccccatgatgggcccgacgtttggcgccatgatgatctccggccacaatgctgcgcacctggcgctcaacgccctgtcgcatgcccaaaggtctcgtccggactatgtcgccgccattgcgcaaagagttgatgattgcgtacaatgacgacgacgtcttggacgcctgattgcagcatgcagagacgacgatcaaccccatcaccatcttaacgtaaatgccttgttcttcaatgatgaatcaatcgaattcccttgcgttaacattaacattgttattgttactactaattt

SEQ ID NO: 17282 - DNA, 285 bp, Zea mays
  Clone ID: LIB84-004-Q1-E1-F4
ctccgctcacgtgccacacttcctcatgggcctcatccttggcgccggtgtcatcgggatcatgatgttgacctctgggttcttccgactgcttccggagctcccaaagatcttctggcggtatccagtgtcctacattgtcgatgggtcatgggggttgaagggcgggtacaataacgacttgatcgggctggagttcgagccgatgatgcgaatgcagccgaaactgaccggcgagtacatcatcaccgagatgatggggctgagcctgaaccactccaagtg

SEQ ID NO: 17283 - DNA, 421 bp, Zea mays
  Clone ID: LIB84-004-Q1-E1-F5
aagcaggcatgaatctcatccatcatcgagagtgtccagaagtgcagcacatatcgaggatattaactcgagaggaggtgaagcatcccggaatggagatcctgatgctttggcaacaatgaacgcaactgcagaagctcttgaagcaaaagaaaagcaaaagccatcgtttgaattgtctggaaagcttgctgaggagaccaacagagttgcaggtgtaaatctattatattcagaacccccagaggctcgaaagtcagagattagatggaggctctatgtatttaaagatggtgaaccactgaatgaaccactgtatgttcatcggatgacctgctacctttttggcagagaaaggaaagttgcagatgtcaccacagatcatccctcctgcagcaagcaacatgcagttcttcaatac

SEQ ID NO: 17284 - DNA, 428 bp, Zea mays
  Clone ID: LIB84-004-Q1-E1-F7
cgggtccacgcatacgtccgaccacatgtccgcaaatttccactggtacaattgtcaaaggttaatcctagctgtatggatcgcgatcagcggctagccttttggattaacttatacaatgctttgataatgcatgcgtatttggcatacggagtacctcgaaatgacatcaagcttttttctctgatgcaaaaggcttgttacacagttggcggccagtccttcagcgcagcagaaatagagtttgtgattcgaaagatgaagactccagttcatcggacccaactttctttgatgtcgactctgaataagttcaagattactgacgatcacaagaagtactcaatcgatgaattcgaaccccttcttttgttcggacttagctgtggaatgttctcttctcctgctgtacacatattctccgctgc

SEQ ID NO: 17285 - DNA, 392 bp, Zea mays
  Clone ID: LIB84-004-Q1-E1-F8
gaagcggctcaatgactagatccagggaggctactatgacggcgtgtgcagcgacgacaccctccgatcacgccagtcagtgaagtccgcctttgaaatccaataactcggaacaatgatgatatgacgaaataggccgtgttttcttggacaatgatgttaagttcggcaacgttttcctttctattattttttttcaactgcgtggtctatgtgtatattgccaaaggcatgcgtgagccatgcgcccggtgctgtgctagggcgcacagactatcggatggtggaaacaccggaaataagagcgtgccgctgtgtgtctcctttgacgaacaagcctggcggtcgagagagctacaaggtgaccaaacatttcagggagctgcttcaaa

SEQ ID NO: 17286 - DNA, 352 bp, Zea mays
  Clone ID: LIB84-004-Q1-E1-G1
ctcgagtcactcaagctcaaagcgaagcccgcgcgtcgatgttcaacctcatctccgacgactggggcgggtctgcgtccccttggatccgacagctctcggccaccttccacttcctcaagaagctccacctgcgcaggatgatagtatccaacgaagatatcaacatccttgtgcgtgccaaggcgcacatgctcgtcacgctgaagctcgaccgctggtccggcttctccactccctcccatcgcactcgtcgcgcgttcccgcaggaaactggaaacacttttcctggaagaaagcaaatttgatgagaaagaaaatgatgagtggatccgttagcttgccacgaaca

SEQ ID NO: 17287 - DNA, 368 bp, Zea mays
  Clone ID: LIB84-004-Q1-E1-G10
cggacgcgtgggcggacgcgtgggccgcccccgagggccagtaagacggatccgatctcccgacctgatgcgtgtctgctgatgtcggggagtttaccaggactgtgccgttcttgatttctgagagcttatcttctagtacacctcgtgttgttctcttcgtcacggcgccggtgcgtgtgcgctgaagctgcctgccattgccattgccgctgtttttaattaagcacacactctagatgttatgcccgcatgctatgtttcgattctcaaagttgataaatgatggctggatgctggttttcgtgctcgaagcctgctgcttcttccatggaaaaaaagacctgcccgtgttgcagcgttgttgt

SEQ ID NO: 17288 - DNA, 399 bp, Zea mays
  Clone ID: LIB84-004-Q1-E1-G11
ggccgcgccctgttcctgggacacttccttccacgaaaaaaagcagcagcagcagcataagctctagctacctctactaccgacctggatccactcaacccgctacgctaagctcccctttcccgttcgacaagagaagagaagaggttattcatccatctgcgctgcagcctgcagagaaggagaaggaggagacaggcgcttgacatgggcaagtacgtggagctgctggacatgggcgtgcgcatcgccgcgcgcttccactcccactgcccgcagaccgcgcgcctctactaccacccgcccgccggcgggccggcggcccgggggacggccgcaagggcgactccgccaccgccgccgccgccgccgccgtgatgctgaagcagcaggggcaca

SEQ ID NO: 17289 - DNA, 423 bp, Zea mays
  Clone ID: LIB84-004-Q1-E1-G12
cgcgcgggtcgacgcatccctctacacgtgagtcgtgctagagcggaaaagcgtggacgagcctggggagccgccgggcgtggtcctaagcgcagccagatcggggtgggtgcccgtggctccggggaagctctgtcagcttcctccgtgacgagcagctgcgtgcggagtgggacatcctcagcaacggaggcccgatgcaagagatgggcaagatcgccaaggggcaggagcacgggaactcggtgtccctcctcagagcgagtgccatgagtgccaaccagagcagcatgctgatcctccaggagacttgcactgatgcatcaggctcgatggtcgtgtatgcgccagtggacatcccggggatgcagctcgtcatgaacggcggggactcgacctacgttgctctgctgccgtctgggt

SEQ ID NO: 17290 - DNA, 419 bp, Zea mays
  Clone ID: LIB84-004-Q1-E1-G2
gctagcgcttatagcttgtcagccatggccaccgccgccgcgtctagcctcctcaagtcctccttcgcgggctcccggctcccggccgccacgcggaccacaccggcgtccctcgtggtggccaccggcccgcgcggcgccggcgcggggcccatctgcgcgtccatgtccatgtcctcctccaacccgccctacgagctgacgtccttccggttcagccccatcaaggagtccatcgtgtcccgcgagatgacccgtcgctacatgacggacatgatcacctacgccgacaccgacgtcgtcatcgtgggcgccggctccgcggggctgtcctgcgcgtacgagctctccaaggaccccgccgtgagcatcgccatcgtggagcagtcggtgtccccggggcggggcgcgtggctggg

SEQ ID NO: 17291 - DNA, 421 bp, Zea mays
  Clone ID: LIB84-004-Q1-E1-G3
aaatatatgacagacaaacaaactagtacagaaaaaaaaaacccgagagaagcaaaagtcactttcgaaggtttagttacggaagccctacccaacggaatgttccgcgttcgcctagagaatgacacgatcatcctgggctatatttcaggaaagatccggtctagttctatacgaatactgatgggggatagggtcaaaattgcaataagtcgttatgattccagcaaaggtcgtataatttatagacttccccataaggattcgaagcgtaccgcagactcgaaggatactgatgatttgaaggataccaaagattcagaggattaggtttttctggggtaataacttccaagtttcaaaatttaggtgcagagacttattttttccaaaggaatagattcatagtttaagaaaggaa

SEQ ID NO: 17292 - DNA, 418 bp, Zea mays
  Clone ID: LIB84-004-Q1-E1-G4
atcgtcgtccacgcctcctcggcaaggttgcgtacggcgtggccctaaggttcatctcgccgcctccctcaacctcttgattccgcctccctcaacctcttgattccgcctccctgaaggcataccagcgggatcaagctattttgctggccaaccgaacggtcaagccgacgatgacgctcggatcggcggcacacaagatcccgctggaggttgcgcacaccctcgtcgagatcgccgaggtcgcgcgctacgcctaccaccaccgccccggccgccctgcaacccacgagggggacccgactgcgccgcccgcaagggctgatatcagcgggggcaccaacgatggatccgcgcggctgctggaggagaacgccatgctccgcgcccgactcgcaaatgacctcgcgctcctgcg

SEQ ID NO: 17293 - DNA, 421 bp, Zea mays
  Clone ID: LIB84-004-Q1-E1-G5
agcgtttcgagtacactgtttgatcacaaggagcagtctgctgccactaagcttcaaattgttgatcatgatggcctgaaatcatcatagtcacaaccacactttgcaatatcaaaatggtctttgcaagaagaatgtcactccacctatgatctcagtgagagggattttactgagccaaagatgaggcatcgaggatcagttactaccccagaaaagggaaatcatgaaagtgcaaacaccacaacactgtctacaggtgctgatgctagcaatcatgttcaaagagcgagatcaaaagcattatcagtctttgggggattggtatccccatgactaagaaccgcccaactttcatttgaaacagcacttgacttgaatgtggagctagcatattcaatgtcgaatatgttagctagtt

SEQ ID NO: 17294 - DNA, 412 bp, Zea mays
  Clone ID: LIB84-004-Q1-E1-G6
cactcctctcgtccgcgcttgtttgttcgcgtcttctccctgtagggaactccgttacccggccccggctgtgcgtggcgtcagcacgccccgcgggcaggagggtgaggctgctgagcgtgaggtgcgagcagggagccaagggcggtggcgggctggacgtgtggctgagccgcggggcgatgctgggcttcgtcggagcggtggccgtggagctgaccaccgggaaaggcgtgcttcagaatgtgggattgaccgcgccggtgccgacgctggcgctggcgctcaccggcgcggtcggcgtcctcacggccttcctcatcttccagtccgggacgccggactgatgggtgaattgtcaaagctcccacaaggacatgcataaagtctgtcagagtcttgtgctgtgtat

SEQ ID NO: 17295 - DNA, 269 bp, Zea mays
  Clone ID: LIB84-004-Q1-E1-G7
atacgtccgaacttgcgactcgctcgctcgatgctagctttccttcgagtaaacgcagcgcctatggccatagcaacgcatgcctctgcagccacgcgcgaactgctggccgtggcatgtgcgccagaggggaacctccgggacttaacctcggagctcgtgctgctgtcgtcatcctacttcgggccggcaccactctgcccgtccacccaggaagctgtggaggatccaaaggggtttttggcccagcaactggacccaagaatgcc

SEQ ID NO: 17296 - DNA, 417 bp, Zea mays
  Clone ID: LIB84-004-Q1-E1-G8
atcggtgctcgccctcctcgtggtgtcttattggtgggtcttccagggactggaaagacacttcttgcaaaagccgtagcaggagaagcagaagtcccattcataagttgcgctgctagtgaatttgttgagctatatgtaggcatgggagcagctcgagtacgtgacctatttgctaaggccagaaaggaatcgccatcgattatttttatcgatgagattgatgccgttgcaaaaagccgtgatagtcgatatcgcattgtcagtaatgatgaacgtgagcagacattaaaccaattgctcacggtaggacagtgccctttcatatttcttgagcattcaccagattagcttcatcgcaagttgggaccgaattaaagcttatacttgtatttttagtggctgataattgatttt

SEQ ID NO: 17297 - DNA, 60 bp, Zea mays
  Clone ID: LIB84-004-Q1-E1-H1
aacacgcgtccgcccacgcgtccgcccacgcgtccgcccacgcgtccgcccacgcgtccg

SEQ ID NO: 17298 - DNA, 362 bp, Zea mays
  Clone ID: LIB84-004-Q1-E1-H10
cacaagcctctaaacatgcgtcctactaacgcgtggggctggaggccaagctggacgaggggcgcagccgtgtggaggccgagctcgtagaggcgctcgccaacctcgaggcgcagaaggaggaggctgttaacgcgctcgacgcccagatcgcctcgctcagtgatgagatcgtcaagaaggtgctcccatccgcgtgatgaaaccagaccggccctgccttatcctaggactatagttacatgaacatcataaattaatgataattttgaagaaattgggcgatgactccgacactgtactcatgaaagattattggatgggttgtgtccaccgcctgtgttgggtgtggattgttgtag

SEQ ID NO: 17299 - DNA, 362 bp, Zea mays
  Clone ID: LIB84-004-Q1-E1-H11
gaagaaaagaagagactgaacgccgcgagttcacgtgacgatggagaacgccgcctccgccatcgctaagccgtcgctgtccaagaagccctcgccgtcgttccgcctccggaacggcagcctcaacgcactgcgcctgcgccgcgtgttcgacctcttcgaccgcaacggcgacggcgagatcagcctcgacgagatggcctcggcgctcgacgcgctcggcctcggcgccgaccgctccggcctggaggccgcggttggcgggtacatcccggccggcgccgcggggctccgcttcgacgacttcgagtccctcgaccgcgcgctcggggacgcgctgttcggccccatgccggtggctg

SEQ ID NO: 17300 - DNA, 412 bp, Zea mays
  Clone ID: LIB84-004-Q1-E1-H2
gaaacttccaaattggatgcagttgccttgagccgtgcacttgagggcaaactgaattctccattatggcacgttcgcatgaaggctatttgtgtgttaaaagccattgtaaggaaacaggatactgatccttactctatcatcgcttcatatttcactgagaacacagcttctgttgttaaatgctctgagctgacacaggtttctctcagatagaaagcctcaaaggtcttgaatatgctgattggggaacaacctaccggaaccgcagcaacataagctgcgatgcccacacctgttcagatgcctgatttgatccatacaggtgatcaagatgatctggcaacaagttctggacatgcatgcattgaacagaattctgggaacagtgcatatgtttcctcagttgatg

SEQ ID NO: 17301 - DNA, 386 bp, Zea mays
  Clone ID: LIB84-004-Q1-E1-H3
atcggtgctgggcggtagtgccaatttgatgttgtcaatcaccctccgcattgtctcaggtgcggctgaggttgttaatttcctgtcacaactgatggtgttcttgtgggtgctgtattaccttattactgtggaaggatgtggagctacagagcaaatcattgatcttttgccagtgtcaaaacaagtaaaggaccgctgtgttgacgtcatggatcatgccatcagtaatgtattgttggccactgccaagattgccatattccatggggggctgacatggatagtgttcaagttcttcaaagtgcattttgtgtacacatcaactgtgcttgcattcataagtgcacttgtgccaatacttcaattttggctgtcctcgatat

SEQ ID NO: 17302 - DNA, 307 bp, Zea mays
  Clone ID: LIB84-004-Q1-E1-H4
gtcacagaacactccgaggatcagcttgagttggtcttaaaagcctgcgaaaggatgaatgcgcatctgacagctgcagttgtctcaaacgacccgctattcctgcaggatgtacctgggacatccgttaacgggacatcctacgccggaattcgagcgacgaccacgggcgctccacagaaccactggtttggcacggccggtgattcgcgaggcgcatggatcgggactccggaagccatcaaacttgtctggacctgccacaaggaagtcatatatgacatcgggcccgttgccaacagctggg

SEQ ID NO: 17303 - DNA, 382 bp, Zea mays
  Clone ID: LIB84-004-Q1-E1-H5
aatccgccctttcggcctctccacactcattgtcggcttcgacccctacaccgacaagccagcgctgtaccagaccgatccttctggtaccttctctgcttggaaggcgaatgccacgggaaggaactccaactctatgcgtgagtttctggagaagaactacaaggagacctccggcaaggagaccatcaagcttgctattcgtgcacttctagaggttgttgaaagtggtgggaagaacatcgaggttgcagtgatgacaaagaaggatggtctccgggaacttgaggaagctgagattgatgaatatgttgctgagatagaggcagagaacgctgcagctgaggctgcaaagaagggtggtcctagggacacctagtcc

SEQ ID NO: 17304 - DNA, 386 bp, Zea mays
  Clone ID: LIB84-004-Q1-E1-H6
gctcttcctcctcgcgaaacgacgcggaggaggttgccggtcaggccaccgccgcgcccgcccgcccgccggagacccggtccgcagccaacgcgtgacgtagggaggacacgcagccatggccacttcctcctcgtcgctcacaacgctccactcccgcttcctctctcccaccccttcctcgccctacatggcggcgctgccccgacggcgaagggccggagcgcggtaccctcgcatccgggccattgacctcgaccagagcacaattgtggccatttcggtgggcgtcgtcagcatcgccgtgggaataggtgtccctgtgttctacgagactcaaatcgacaatgccgccaagagggataatacacagccatgtttcccct

SEQ ID NO: 17305 - DNA, 400 bp, Zea mays
  Clone ID: LIB84-004-Q1-E1-H7
accagcttctccctcggctcgcccaagctccttcttcctcctccaactcggcgcctggatctctctcctccctccagctctctccagccgcgcgtctccctgctcgctgcgttcttcttcctccctggctcctgctcgcccaacgacgccatcggccggatctcctctgctctctctgctcgccttggcccgccgtgctctgctcgtcaatgccgcgtgagcggtgagctctctgccgcggcttccttcctcttccgctccagccttctcctttctctcttctctagccctgttcggcccccagcttggatcttccttccgctcggtcgtctgcctctcgcgctcggctccctggagtggatttcctcgccgtggagctcagcttgtgtattgtccgccg

SEQ ID NO: 17306 - DNA, 348 bp, Zea mays
  Clone ID: LIB84-004-Q1-E1-H8
accacgcttccgcccaagcgtctgtggtgcgcaagccggcgcacactgttcatggacgagctgggcgtggcgtacgacaacgccaatgactacgtggtcatcaagcacgccgcgctcttcacgtccacggtcatgagcctgctcctggtgcgccccaaagtcaagctgttcatcacagtggccgtggacgacctcagcgtcaggggagggcgcgtctgccgcgtcatcagcaactgggcgctcgtgtcgatgatccacgacacgcagtcctgcatggaccccaacgtcatcggcgccagagtcgtggtcagctcctgctgccacgatcgacccttccgctccaccgga

SEQ ID NO: 17307 - DNA, 415 bp, Zea mays
  Clone ID: LIB84-005-Q1-E1-A1
aagacgcgtggggaggacgacgacacatctatattgagtgagcttatcgccctcgcagaggcaggattacatgaagaagaggaggacgacacgtcaaggttgagtgagctcatcgcactagctgaggcaggattacgtgctcaagaggaagaggatgagtttatgtcacaggccgccgcagaggtagaggcagcttattacaagaagaagtctgatgaggctgacgctgaggatgagctattctcccaagctgcagatgaagcagaagccaattattacaaaagaactggtgacaagtgtgatgcaggacaatgcagcaagtggaatgaggttgttgttgaggattgcgcgacggatgactccgaagatgagttactcatagattgtgattcagactggagaattgaagatttga

SEQ ID NO: 17308 - DNA, 397 bp, Zea mays
  Clone ID: LIB84-005-Q1-E1-A10
atcactgcacgttgccggctgcccccgcggccccggccagtccatcccctcgctcgctccccaactccagcaggcagatcagatacatccatccattcgcggaccggaaggaaaggaagggttgaactatgagcgccgtggcggtttcgtcgtcgctgaacccggacgcgccgctcttcatcccggcggcgctgctgcaggtggaggacttctcgccgcagtggtgggacctcatcaccaccactgcctggttccgcgaccactggtcccgcgagcgcgcccacctggacgagatggccgagcagatcgacgccgccggcctcctccccgacgacgaggacctcttctacgacgaccagctcgagcagggccccgtcgccgccgcccttaagacaga

SEQ ID NO: 17309 - DNA, 424 bp, Zea mays
  Clone ID: LIB84-005-Q1-E1-A11
cagttagaggactttgccaatcacaatgcctttgatttgcttgaaaaatatagcaagagccatcttgttttcaatgatgatatccagggcacagcatcagtggtccttgcaggtttgttagcagcactcaagatggttggtgggaccctggcagagcagacgtatttgttccttggtgctggggaagctggaactggtattgcagaacttattgctcttgagatttcgaaacagacgaatgctccaattgaagagtgccgcaagaaggtttggctggtggactcaaaaggtttgattgttgactctcgtaaaggctcccttcagccattcaagaaaccttgggcgcatgagcacgagcccttgaaaaccttgtatgatgctgttcagtccatcaaacctacagttctgatcgggacatctggag

SEQ ID NO: 17310 - DNA, 435 bp, Zea mays
  Clone ID: LIB84-005-Q1-E1-A12
gtccgaccaggacgtacgtacgtacgtagatcgatccatcgatcgctagctagctgacgaccatggcgtccctctcctctgccgccatcaccgccccttccttcacgggcgcgcccgctcgcgcagtggtcagcaagaggtccttcaccgtgcgtgcctctctccgcaaggccactgccaccgccgccgtggccgttgccgccagcgtcctgcttgccggcggcggcgccatggcccaggaagtggtgctgggcgcaggcgacggcgggctcgtcttcgagcccagccagttcatcgtcaaagccggtgacaccatcatcttcacgaacaacgcccggcttcccgcacagcgtcgtgttcgacgaagacgatgtgccgagcggcgtcgacgcgtccaagatctcgcaggaggagtacctccacgcgccaggcgag

SEQ ID NO: 17311 - DNA, 373 bp, Zea mays
  Clone ID: LIB84-005-Q1-E1-A2
aggacacgtgggcggacgcgtggggatggattcacatttggagggaaactactcaacagatgaggcaaccacattggttgacctggcctcccagtgcctacagtatgagcctagggatcgggccaacactaaaaagctggtttccgtactcgagcccttgcaaataaaatcagaggtaccatcctacgagatgcttggcattccaaaacatgaggaagaagcgcctccccctccacaaccgcaacgccctctctctcccatgggtgaagcctgttctaggacggatctgacagctatccatcaaattccaatgaacacgcattacagggacgatgaatggagcatcgagctatcgttccaggaatggacgcag

SEQ ID NO: 17312 - DNA, 181 bp, Zea mays
  Clone ID: LIB84-005-Q1-E1-A3
gcgtccgaaattttggatcatcaatagtgctggatcgtgatgatgataaagtcaccggggatgccgtagcaggcacactgggttatgtcgctccagaaaaacttatggaagcttatgcatcaatgatgtctgatgtgttctcttttggaatcatcatcagtgagatcattaccgggaggag

SEQ ID NO: 17313 - DNA, 364 bp, Zea mays
  Clone ID: LIB84-005-Q1-E1-A6
aagagctcgatgtaattatagcaacacctggccgtttcttgtatctgcttcaagaaggctttgtgcaactagctaacctcagatgtgttgtgttggatgaagtggacattttatttggtgaagaacgtttccagcaagtgcttcatcagttgatcaccgaggcaccagtgacaacgcagtatcttttcgtgactgccactcttcctcttgacatctataacaaggtcgttgaaacctttcctgactgtgaggtgatcatgggacccggtgtccaccgaacaagctctcgccttgaagagatccttgtggactgcaacggcaaatgaccacgaagaaagagatccagaaaccgccttttcgaaca

SEQ ID NO: 17314 - DNA, 372 bp, Zea mays
  Clone ID: LIB84-005-Q1-E1-A7
gtctcgtgaccgctggactcgccgccgccccaggctagctcgatgattgggtgcgccaagccgctcgcggcgccgctgcaggcatgggctcgcccgccgtctcccgccggtcgccgcctccccccctcgttctgcgcccctgacacctccccagctctcaccggcgccgtcaagaccccaggccagtctcattctgaggacgcccggccaccacgctcgggtgaggccgcctcgtccctggcgccgcgcgcgagctcgcatctcgaccgatggtcccggtcgcgggcgctgcggtcgggccaccggccggcgctgaaccgcgcggctctctcctcggcctcggtctcggcgccgccggtgatcaagtcgccg

SEQ ID NO: 17315 - DNA, 396 bp, Zea mays
  Clone ID: LIB84-005-Q1-E1-A8
aacacgcgtccggacaccaagcaatgatggagaagtaatacgagtgactgtcccaccattgacatctgatcgcagaaaggaattatcaaagacagtagctaaattagctgaagatggcaaggttgctataaggaacataagaagagatgcaatcaaagcttatgataaactagagaaggaaaagaagctttctgaggacaatgtgaaagatttatcagctgatttacaaaaagtcacagatgagtacatgaaaaagatcgaatccatccagaagcagaaggaacaggaactgatgaaaatttagacctcaagctgactgtatggctggtgaggagtaaccgcctccgtgaagcatggaccccggcatatgttggtgtttctgaagcaatttgtttg

SEQ ID NO: 17316 - DNA, 375 bp, Zea mays
  Clone ID: LIB84-005-Q1-E1-B1
accacacgtccgctcggccatggtggtgcgcaagccggcgcacctgttcctggacgagctgggcgtggcgtacgacgaggccgaggactacgtggtcatcaagcacgccgcgctcttcacgtccacggtcatgagcctgctcctggcgcgccccaacgtcaagctgttcaacgccgtggccgtggaggacctcatcgtcaggggagggcgcgtcggcggcgtcgtcaccaactgggcgctcgtgtccatgaaccacgacacgcagtcctggcatggaccccaacgtcatggaggccaaggtcgtggtcagctcctgcggccacgacgggcccttcggcgccaccggcgtcaagaggctccaggacatcggcatga

SEQ ID NO: 17317 - DNA, 400 bp, Zea mays
  Clone ID: LIB84-005-Q1-E1-B10
accacgcgtccgaggtccccctgcgccaacggtcaatgcatggaacctatcaaaccaagccggcgattctccgatcccaaccagactcatggtggcgttcatggcgagcagcggggccatgaaggcgtcgagcaggccaaccttcgtcacccctcgtagcttctttaactggggcaaaagcgcgagagaaaccgagacgccgccgccgcagctgcagttctcctaccacgacgtcgagccaccgttccccatgtcgctcgtggcaaaaacacacctcagagaccgtgagctcaggtgctgctacaaggccaccgtggacggcttcagtgctacggacttccaccggcggtgcgacttcaagggcccctgcgtcgtcgttggctacaccgacggtggcttc

SEQ ID NO: 17318 - DNA, 400 bp, Zea mays
  Clone ID: LIB84-005-Q1-E1-B2
aacgaaaaaaaaaggttaaatgatatgaaactcaaaatggatgaagaatacaagcagcagctggagagtcttgagcgcaaggaaaaggctttgagtgatgatatgaagcacaagcaaatggaaaatgatgaatttctgaagggagaacgtgctgatgttcaacgtaaattgcaactcaaacggcatgaattggcgatggagatggagcaaaaacaagccacgaaggagaaggaagtggaagaaaaggaaaatgagttaaataagaaaatagattttgtggaaaataaactccgacatgcaattgagttgaatgagtccaagattgagaagttattaatggagaaaagggaggtgcagatgggaagagaattactgctggagggaaagaaacaaaacggag

SEQ ID NO: 17319 - DNA, 410 bp, Zea mays
  Clone ID: LIB84-005-Q1-E1-B3
cacgcgtccgacaaaatgcacgggaggacccagggcgccgccgtcggcgacatgacccagcgccttctcctcgccctctcgctcatcgcatcagcgaccgccgtgcccgctgtcatccgcacggtcccggacgaccccaccgcgggctcctctggcgcggcagacgccgcggacgccctcttctgtgacaactggaagctgtccgtggagactgccaacgccggccccttgagccccctgccctcgcgctgtggggctttcgttcgggactacatggatggacctcgctacgcgtctgactccgccgtcgccgacgccgacgccctagccttcgcctccgaagccctggccgccgccgagtggggcggctcggcgagcgccaaggcttcgtgggtgttcgacgtccacga

SEQ ID NO: 17320 - DNA, 252 bp, Zea mays
  Clone ID: LIB84-005-Q1-E1-B5
gggtcgacacaagactctaaaatgacgtcgtactacctgcgattcgtcatgtaaaatcagggtgtctgtctataatctaacctccatggatgctcaacctttgtcatgtaacaataatcagtgctactcttcattacataattttgatgcatatctgtttaaaaaaaaaacaacaatagaaaatcagaaaagaacaaaagaaaaaaaaaaatagaaaagggaaaaaaaaaaaagggtggtcgctctaaacga

SEQ ID NO: 17321 - DNA, 399 bp, Zea mays
  Clone ID: LIB84-005-Q1-E1-B6
attttgttttccctctcccgttcatctctctcctctttggccttcctttccttgcgacgacgactgggacgagcgccccccgcgcttctgcaggcgagcaccccgccaccagtcggagatgaacgcgtccaggaaatccagccatctctccagcaaggacagtgcagagaccgcgagggatatcatcaccacgtccggccaaatccaacccctcaaaatcccggacgctgttgctgcgctcgcacaggctgctgcaaaggcaaatggtgagaccgagaaatatcttccagggtggccgttgttctcgcctcctaaggtgcagttggacaagtgtaccaagtgctccagagaattctgttctgcaatcagcttccggaggcacacacgtgttcatcgtag

SEQ ID NO: 17322 - DNA, 285 bp, Zea mays
  Clone ID: LIB84-005-Q1-E1-B7
caaatctctgtctcgcgctggtgcagcgcagggcacccccacgcgcgcctcatccggtaccggcatgacgagcgcctccgaactcttcaccgcgcgccgtgccgcccgtggggcccgcttctccgacctcaacctgggatcgaaggccgacgcactccgggacgagcagggccgtgcgggcccggaaccggcgccccggttcgcgcccgcaagccaatttgaacgcgtcggggaacgtgcggcaacacgtgcacaccggggcccccacaccgcgtcgccgcgggt

SEQ ID NO: 17323 - DNA, 406 bp, Zea mays
  Clone ID: LIB84-005-Q1-E1-B8
agctttctctctccatctcgtttcccccgcctgcgcagccagcgcaaaccctagccaacaagcgccgttctgcgaggctctcggcagcggataacttaacctgtcgcgcaaggatcgggggagagaaaccagcggcaacttacgtggatcggggttgtttggtgctgctgcggcggcgcagggatggaccggaagcgcatcaaggacgcgctcgagaagcacctggagaggtcgtcgccgtctacttccaggggcgtcgtgtccaaggagagggagcgcctcgctgccgggaagctgccgtcatcgcttggcaaggcggaggtgtctgatggtgaggaatttgaaactgacagtgaagattctgatgtgagtggttccgagggagaggacacgtcctggatttcat

SEQ ID NO: 17324 - DNA, 204 bp, Zea mays
  Clone ID: LIB84-005-Q1-E1-B9
gctccaggacggacgtacgtacctagatcgatccagcgatcgctatctacctgatgagcatggcgtccctctcctctggcgccatcacggccccttccttcgctgccccgccggcactcgcactggccatcacgatggccgtcaccatgcgtgcctctcttcgcaagggcagtggcaccgcctgcgtgggcgttgccgccaccg

SEQ ID NO: 17325 - DNA, 356 bp, Zea mays
  Clone ID: LIB84-005-Q1-E1-C1
ccacgagtccgcggacgcgtgggcggacgcgtgggcgaaaccgaaagcacccgcaccaatctctgcgtctcttcgtcttcggctgcgcggcggcggcagcagcggacgaggttgaggagatgctgtccggcgacatccccccgagccagaccatctacctcaacaacctcaacgagaaggtcaagaaagaacaattgaagagatcgctttatgccttgtgctcacagtatggaaggatactggatgtggtggccctgaaaacacaaaaactgatagggcaagcatgggtggcgtttagcgaaattacagctgctaccaatgctttccgtggattgcaagattttgatttctacggc

SEQ ID NO: 17326 - DNA, 426 bp, Zea mays
  Clone ID: LIB84-005-Q1-E1-C11
aaagggcggacgcggagccggcggcggagcggagatggcggagaagaagcgaggcgccggcactcgcaaggatgaggtggtgacacgcgagtacactatcaacctccacaaacgcctccacggatgcacctttaagaagaaggcaccaaatgccatcaaggagatcaggaagttcgctcagaaggccatgggtactactgatgtccggattgacgtgaagctcaacaagcacatctggagcagtggtatccgcagtgtgccgaggcgtgtccgtgtcagaattgcccgcaaccggaacgatgaggaagacgccaaggaggaactctactctctggtcacagttgctgagatcccaccggagggtctcaaaggtttgggaactaaggttgttgaggatgacggataagccctgtataccatgagata

SEQ ID NO: 17327 - DNA, 297 bp, Zea mays
  Clone ID: LIB84-005-Q1-E1-C12
tgtggatttgggggagcttcttcactggcgagtgtagagctccggtacccaagcgacggaacgaacacggacgaggggaatcacataggtctccccgatggcggactggggccccgtgatcgtaacgacagtgctgttcgtgggcgtcacaccggggctgctcctcacgctgctcgggccggcgccgcgtctcagagttcggcagctatcacaccaaccgcctggccatcctcgtccaacccgtcctctacttcgcgctcatcagcatcttcctcatcgctagtcggatccacgttt

SEQ ID NO: 17328 - DNA, 407 bp, Zea mays
  Clone ID: LIB84-005-Q1-E1-C3
cggacacgtgggcggtcaccctattactgaagatggtagcctgacttacatgacacataaaggctggattctgaaaggacccagtagtagcaacgaagtagtccatgctgggattccagatgtcatggtcattgttctacctcacctttgctttgtgttagtacccaccattgtgattttagctgccatggctgctgagagaacagcatatcgagagcattatctttctcgatcaggaaagaagaaagatgactaccgtaagaacaggagacagatagaacatgaaaacttttggaacggtcgctggattaacaaatttctgtgtcttctctgcgtggtggttctatgcaaacattggaagctttgcagagcgctcgttaacgcttatgctatgaaccccttgctcc

SEQ ID NO: 17329 - DNA, 397 bp, Zea mays
  Clone ID: LIB84-005-Q1-E1-C4
gggaagaagggagcggccgggcgcaaggtcggcaggccaaggaagaagtcggtgtcgaagtccgtgaacgccgggctccagttccccgtcggccgcatcgggcgctacttgaagaagggccgctacgcgcagcgtgtcggcaccggcgcccccgtctacctcgccgctgtcctcgaatacctcgccgctgaggttctggagctcgctggtaatgctgccagggacaacaagaagactcgcattattccgcgccacgtgcttctggcgatccggaacgacgacgagcttgggaagctgttgggcggcgtgaccatcgctcacggcggtgtgccccccaatatcaaccctgttctgctgcccaagaacaccgcggagaacgcgtccagtggcggggagc

SEQ ID NO: 17330 - DNA, 343 bp, Zea mays
  Clone ID: LIB84-005-Q1-E1-C5
aggacgcgtgggtgctggacctttccagagggcggaggattgcaccgtattgcaggcggcgatatctactaagacaccatacattgatgtctgcgatgacacggactattcttggagagctcagggcttccatgagcgagctaaagctgcctgtgttccggccattactagggctggcatctatccgggagttagcgatgtgactggcctgctgaccttgtcgatgccgccagatgtcaagttggcgaacctgatggaccaacatgcctctactagagtgcatgtactggtggtgccggtccaccactattgactcggcgctctttctacgtcgtggggagga

SEQ ID NO: 17331 - DNA, 318 bp, Zea mays
  Clone ID: LIB84-005-Q1-E1-C6
aaacacgacgtctgcccacgcgtccggagcggcggccattcttcaactccattttttgttgtctgttggtatgcagagctagtatagacgtctcctccaactcaagggtggtgaaagtgctgtcagcaacgtacgggtattgatcgagtttgacatattccaagaaggacaaagaccaatgcatgagaagatggacaatgtgacacagaataatctctggaaaatagatacttggaagcatcatcgtcaaacaagactattatgaggactacaaaagccgcccgcccgttcgacagcgagctataaagtgaccggaag

SEQ ID NO: 17332 - DNA, 408 bp, Zea mays
  Clone ID: LIB84-005-Q1-E1-C7
aggacgcgtgggcggacgcgtgggtgttggcagtccaaggtatctttcggggattcaaggatacaaagactccggtgttttatataggtttgggcaatctttctgctgtagcccttcttcctctacttatatatggctttaagcttggcataactggtgctgcaatttctacagttgtgtcccagtacattattacagttcttcttatttggtctctaagtaaaagagctgttttgcttcctccgcgaatagatcaattagagtttggtggatatctaaaatctggtggaatgctgttgggaagaactctttcaattctgctaactatgaccattggtacatcaatggctgctcggcaaggcccaacaacgatggctgctcatcagatttgtttgcaagtatggcttg

SEQ ID NO: 17333 - DNA, 118 bp, Zea mays
  Clone ID: LIB84-005-Q1-E1-C8
aggacgcgtgggtttgtcctgacagttcggattaccactttcatcaaacgcagagacgaaactccgcaactccgccgacgaactaataaccaaaataaatatgtataaaatttgatgt

SEQ ID NO: 17334 - DNA, 407 bp, Zea mays
  Clone ID: LIB84-005-Q1-E1-C9
aaccactccgcgctagctgaggacggtacagcggcacagaggtgcgacgtacgacgacgacgacgcaggcgccacacatggcatcccagctctccgccgccgtgccccggttccacggcctccggggctacgccgcgcccaggtccgcggtggcagcgctgccgtccgtgagggtgggcaggaagaggtcctcgtcgcatggcatccgctgctactacatctgctccgccaccagcctgatcatggtgacgacgacgacgctgatgctgttcgcgggggcgtttcggctggcgccgtcggcgaatcccagtgcgacggcggggctgaagctggcggcgctctactcgcggctgcagacgggtgacgccgccgggttcaagctcgccgacacgctggcctgcggggcc

SEQ ID NO: 17335 - DNA, 399 bp, Zea mays
  Clone ID: LIB84-005-Q1-E1-D1
agcctgtagagtgcggggagcaggagccggcggagccatggcgaccactctttcgttatcctctcccctcttcctcggagctccggccagagctagagatgtggttccgtacggagtgacttcggctagtgtatcactgatgactctaaatatgccaggcaagggttacacgagtagagttcgttgtcgggagcagcagcgacgaacgacaatagtatctatgcttggaaggaaatcaacggctagagcaactgttgtcccagaccccgactataggttaccaatcgctatacttgggattgctagtgcttttgcatatgccgacaatcttctcgctgctgcacctgtaggactgctggggcttcttcttttgttccagactacaaaaatgaggttcgt

SEQ ID NO: 17336 - DNA, 242 bp, Zea mays
  Clone ID: LIB84-005-Q1-E1-D11
cccagccgtccgagaagcactacactacactacaccacacccacccgacgacgatcacacacgcagaagatcgagttcgttcgatcgtgaccgtgacgcacgaagctataagctagccaagacatgaataataatggcggcctctaccgtggtgagcctctctgtcccggtgacgacgacgaccttcgcggtggctggcggcggcgacgtgctgatcgtcgtcccgaggagggcgggcgcca

SEQ ID NO: 17337 - DNA, 407 bp, Zea mays
  Clone ID: LIB84-005-Q1-E1-D5
cgacgcaagcgtctgaagagagtcatatcacgagcggcctccctttttttttttttttttttttttttttttttttttttttttttttttttttttttttttttttctgtaaatcactcttaattccattagatctcgagaattagagcaagacagacagtattacatcgtgctgctgctgctgctgctacagatacacacacagcaggaggagacaggaaggtttcgcgagaccaggctccctcgactccccacggattagaggatgagttagtcacattaccagagagtagttaccgagtcttggcagtggtaaaaaggaggggaacaggagagagaggcgaaaattatcaatttcgagggagagaatagcaggatagcacgagaggcacttcatggcggggtgg

SEQ ID NO: 17338 - DNA, 350 bp, Zea mays
  Clone ID: LIB84-005-Q1-E1-D6
agcctcgttccgcacccggcgtgcctacttctactgggtgacccgggagcaggggtccttcgagtggttccgcggcgtgatggacgaggtggcggacacggacaggaagggcgtcatcgagctgcacaagtactgcaccagcgtgtacgaggaaggggacgcccggtccgcgctcatcgccatgctccagtcgctcaaccacgccaagcacggcgtcgacgtggtgtccggcacccgcggtcaagacccacttcgccagacccaactggcgcaacgtctacaagcgcatcgcgctcaaccaccagaaccagcgcgtccgagtgttccactgcggcgccccggtgctgaac

SEQ ID NO: 17339 - DNA, 277 bp, Zea mays
  Clone ID: LIB84-005-Q1-E1-D7
accacgcgtccgcccacgcgtccggggacgaggacatggacctggtgatcccccggtgttcaacggctgcacccgattgctcaacgccgaggaccagaaggtggcacgagacctctactgggaggcggtatgcggcgaggaggcgtcggactggctcaaggtggaccacctcctccagcagagcattgccaataacccttttgtgggggaaccacacctggtgcttgcccagttgtaccttaacatggaaaggtacggcaaggcgcatatccagcgc

SEQ ID NO: 17340 - DNA, 406 bp, Zea mays
  Clone ID: LIB84-005-Q1-E1-D9
accacgcgtccgcggacgcgtgggagcgcattcgcgattttggccgcctccgccgccgtccgggaagatggcgggtctgggaaaggcgatgtacgcggtggggttctggatccgggagactggccaggccctcgaccgcctgggctgccgcctgcagggcaagtacttcttccacgagcagatttcaaggcatcgcaccatcatgaatatctttgacaaaacccctcatgtgcataaagacgcatttgttgctccaagtgcatcccttattggtgatgttcaagtcgggtcaggagcttccatttggtatgggtgcgtcctaagaggggatgcaaacatcatacaaattggatctgggaccaatatacaagacaattctcttatacatgtggctaaatctaatcta

SEQ ID NO: 17341 - DNA, 173 bp, Zea mays
  Clone ID: LIB84-005-Q1-E1-E10
tccgaggacgcatgggatccggaggaggttttctataacacagctcagtactatagggcataccatggacataaaacgggtcctcgtgcagtgttgattggtcgtcgtccaattgtttcagcatttcaatacattaagcagcgaacgaggtataaccaggccatgaaaaatgt

SEQ ID NO: 17342 - DNA, 252 bp, Zea mays
  Clone ID: LIB84-005-Q1-E1-E11
gtccgagaagaagacgacttttggaacatgcttttgatcagctaagtttgcattctgaagaacatctcaaaggaccgattctagtttcatttactaatgagcatcgcgacgaacaggttagaatctgaagcggcggaactttcaaagatttcatggaaaatactactccagcggcttttggtgtgcagtaccgtctcttcaaggcgactgccgattatctttcgtagcccatcaccacggtcaggattggct

SEQ ID NO: 17343 - DNA, 376 bp, Zea mays
  Clone ID: LIB84-005-Q1-E1-E12
gtccgatgctgcatacccttcaagcctgccgaccatcgcatcatcggtcatcgctagctttttttcttcacttctggtctgcgtctcttgtttgctgttggattcataagcgcaaggaaggacgagagatagagcgacgaactgtcttgctcggaactctcccacaactgggctctgacatgagtaatgggttctgaggatataaccgcgcgagcttcctcccgttctgcgtaccctgcgacgtatgggcaacgccgggggctatgacctgtcaccaaagaagagggaaaatgcgagaaaagcaacggctgtaccatgataaccaaggatgcatgtattgctgtttgagtttccgtcgtgttcacagaatcctctc

SEQ ID NO: 17344 - DNA, 398 bp, Zea mays
  Clone ID: LIB84-005-Q1-E1-E3
gtcataataatatgcatgctcctcaacttaacacagggaaaacaggtcaggaagaaagtgaagggcttcttcaagcgctatcctgatgctcaaacagaattcagaaattctctaaggcttacgttggagaagaatggacctatatcactgagctttgtggtgttggcaagtatgctgctgatgcttacgcaagcttctgtgctggaagggcaaactaagtggttccaaaagatcacaagttagtagattactggaattatgtctgttttgagttaccctcgattcagaaatcgcaggacgctggagtgaccgagctgggaaaccttgtcgctaaagtgcacgaagttgctgtgagctgttgacatgggaaaacagtaacgcggtgggaagcgcttttg

SEQ ID NO: 17345 - DNA, 343 bp, Zea mays
  Clone ID: LIB84-005-Q1-E1-E7
tagcatgtctccaaccactatcctcattgagaattgagaggcagactctagttggaatacaagacttgcttgatcagcccaatccagctgatcctgcccaaactgatggttatcacctattcatccaggatccaacagaatataagcgacgtgttcgtctgcaggccaagcaatatcctgctctggtcggaggatgttggcataccacagatccatgatccatcctgcacatccgcagactagttccaaatgtgaaaattagggtctcaaattggatttgacgggacataggttgtcgggaggattgtccaggtgtaaccggaaccttctatgatgtgtacga

SEQ ID NO: 17346 - DNA, 396 bp, Zea mays
  Clone ID: LIB84-005-Q1-E1-E8
aagatatttacatgtacaaagacttgattattgcattaaccaaatgcaagaatatggaggaaaccatggtaatcctggggaaaaagagaaaatgacaattgtttcctgaatcacaaacttaagcccaagttataagaaggttccttaaaaaatggtccccaaccaattgaaatgactatttacgaggacatgaaaaagtcacctgatccaccagaagatttaccttttagggtactgttaaagggtcttttacctcacccactgtctaagaaatacatttaaaacaagattttgaacaaatgttcccaaaaaaggcatatctatgattctccagaagaaatttttggcatgcactgacgtatattcagaggcatgaatgtatttaccaactggatg

SEQ ID NO: 17347 - DNA, 314 bp, Zea mays
  Clone ID: LIB84-005-Q1-E1-E9
accacgcgaccgcccacgcgtccggtcgtggatccccgccttcaagagcgacgccgagttcatcaacccgccctggctcgacggatcgctccctggcgacttcggattcgatccgctggggctgggcaaggacccggcgttcctcaagtggtaccgggaggcggagctgatccacgggcggtgggcgatggccgccgtgctgggcatcttcgtgggaaaagcctggagcggcatcccgtggttcgaggccggcgccgacccgggcgccatcgcgcccttcgccttcggctcgctgctgggcacacaactgctgc

SEQ ID NO: 17348 - DNA, 430 bp, Zea mays
  Clone ID: LIB84-005-Q1-E1-F10
agcccgtgcaacctcatatcatcccctgccacgcacctccgtccgccgcgccatggaatcgaggaggagggccgtgcccaccgtgacggcggttgcggtggcgacgctgctgctgctgctgatgtcgtcgggcgtgggcggcgacttcgcggcggaccgggcggagtgctcggagcagctggcggggctggcgacgtgcctgacgtacgtgcaggagcaggcgacggcgacggcgccgacgcccgactgctgcgcgggcctgaaggcggtgctgcagagcagccgcaagtgcctgtgcgtgctggtcaaggaccgggacgaccccaacctacgcctcaagctcaacgtcgacaaggcgctcggcctccccgccgtctgccacgcgcccgccaacatctccgactgccccaagctgctggacctgccgggc

SEQ ID NO: 17349 - DNA, 438 bp, Zea mays
  unsure (1)..(438): unsure at all n locations; Clone ID: LIB84-005-Q1-E1-F11
gtcgacccgcccgtccgcagacgcgtggggcaagatanggtgtgggacgacaaaccttccaacaagaagctggattttacagacccggcagacgagagaggggacgaggtgacagacaatgtggcggtcatcgagggagaaagcatgatggataaggatgaggatctgagcagcgacagcgaggacgaagaggtggaagatggacccaaaaagaaaggatggttctcatcaatgttccagagtatttctggtaacaatgtattggagaagtctgatctgcagcctgcgctcaaagctctcaaagataagctgatggcaaagaacgtggcacaggaaattgcagagaagctttgtgaatctgtcgcagctagccttgacggcaagaagctacgatctttcactagaatatcatcaacagtccagacagctatcgaggat

SEQ ID NO: 17350 - DNA, 416 bp, Zea mays
  Clone ID: LIB84-005-Q1-E1-F12
tccaaactcctcatgcatcctacctccctggtgcccgtcacgttcaccacgttcgcccgctcattcaccggcggcgtcgcccagctcggcctcccgccgcccacggcagccaggtccccgggccgcccgctcggtccgccaccgaagcaacgaattggttcttttagtacttgacagaaatacatatattccacgcatggtggcgtctttagacaatgtgacgggcttgactttagccatgtcatcgagtgcattcattggttcgagctttgtgatcaacaaagttgggttgaagaatgctggggataatggggtccgtacagcttccggaggcctctcaaatctatatgagcccttatggtggttgggaatgataactatgattctatgcgaggtaaccaattttgcaacatatg

SEQ ID NO: 17351 - DNA, 306 bp, Zea mays
  Clone ID: LIB84-005-Q1-E1-F6
accacgcgtccgcccacgcgtccggggtgaagcaccgccgccgtctccgctgccgcacaaagacgagaggaagaggttcccggcgcctccaccaccatgtcgtcgatgatgaacgcgctggcgaactggctggcgaacccgcgccgcaacccgctggcgcgcctccacatgcacgccgtctcctcgcgcgtcaggaaatacggactgaggtacgacgacctctacgacccctacttcgatctggacatcattgacgcgctcggtacgctgcctagggaggtggtcgacgcccgcatccagcgcctc

SEQ ID NO: 17352 - DNA, 378 bp, Zea mays
  Clone ID: LIB84-005-Q1-E1-F7
aattcctctgggtggtgcgagctcctctcggcgacaacccggagagggagttcggcgacaaggctgacccggacctgcaggcgctcctgcccgaagggttcctggagaggaccagagggcgcggccttgtcgtcaagctatgggcgccgcacgtggcggtgctccggcacaaggcgacgggcgcgttcgtgacgcactgtgggtggaactctgtgctggagggggtcatggccggcgtgcccatgctctgctggccgttgtatgcggagcagaagatgaacaaggtgctcatggtggaggagctacggatcggcgtggagcttgctgggtggcaccagcatgggttggtgaaggccgagaaactggaggccaagggtg

SEQ ID NO: 17353 - DNA, 265 bp, Zea mays
  Clone ID: LIB84-005-Q1-E1-F8
tcaaaagctaccccctatccgatccaaccctctggctgctcctccgtccggccggcatcggcagtgcaggatggctctgaggatgtgggcgagctcagccgccaatgcgctcaagctctcggcgggcggcgccggagcccgggctgctgccttctctatctccaggttcttctccactgttcacgatgggttgaagtacactcagtctcacgaatgggtcaagacgaccggcgacctcgccaccgttgggatcacgggccatgct

SEQ ID NO: 17354 - DNA, 446 bp, Zea mays
  Clone ID: LIB84-005-Q1-E1-F9
gtcgacccggcccgtccgagaacagaaaggaaacaccgccgccgccgcgccttccattccagtactcgcggaggaaaggaacaccagccagcgccatggtcacgtcgacgaccgccgccgccgtgctgtccccgccgtccgtggccgggcttcgcctggcgccgtctccccgggcgcgcgtggcgttccgcgcggcgcgggcgcggcggtccgtggcggcgcgcgcggagctgagcccgtcgctggtgatcagcctgagcacgggcgtgtcgctcttcctgcgccgcttcgtcttcgtcaacttccagcgggagaacgtggcgaagcacgtgcccgagcagaacggcaagacgcacttcgacgccggcgacgagcgcgccaaggagttctcgggcctgctcaagtccaacgaccccgtgggcttcaacctcgttcgagtcctcgcc

SEQ ID NO: 17355 - DNA, 382 bp, Zea mays
  Clone ID: LIB84-005-Q1-E1-G10
gtcaattgggaaagatgcttcaggcaacgagctgcttcttgatgttggcctttggttatctcagaagataaatgaacatttcaagaaaaacaagatgaccattaatctgaagtacatagatccaacgtacatgatacttgccatcccaagcaatgcttctgataacgtctattgcacactgctggctcacagcgtggtccatggagccatggctggatatactggttttaccattggccaagtgaatggtcggcactgctacatcccattctataggataacagagaagcagaacagagtttcgataaccgacaggatgtgggcaaggcttctctcgtcgacgaaccagccaagcctcctttgcaacaaagtcgtcgaggag

SEQ ID NO: 17356 - DNA, 362 bp, Zea mays
  Clone ID: LIB84-005-Q1-E1-G3
agctgttcaacgccgtggccgtggaggacctcatcgtcaggggagggcgcgtcggcggcgtcgtcaccaactgggcgctcgtgtccatgaaccacgacacgcagtcctgcatggaccccaacgtcatggaggccaaggtcgtggtcagctcctgcggccacgacgggcccttcggcgccaccggcgtcaagaggctccaggacatcggcatgatcagcgccgtgccggggatgaaggcgctcgacatgaacaccgccgaggacgagatcgtgcccctcacgcgcgaggtcgttcccggcatgatcgtcaccgggatggagggtcccgagattgacggcgcccccaggatgggcccgacgttt

SEQ ID NO: 17357 - DNA, 280 bp, Zea mays
  Clone ID: LIB84-005-Q1-E1-G9
aagtctgtaatcaaggctccatgccgcaatgtacatttgctggcatcccacttcaactggcaggaaccaaaaaaattttggcattcatggaccgaggtgaccacggggcgaacggcaccttcattaatattggcccactaggtgctagagatgttcccacataatatgatatgtttgtcctcattgctccacagaatgctgttggcaaccgcacaattgatgatatcagagctatgactgatgctgctggtgatacacctgtcaatcttgtgaatcctcg

SEQ ID NO: 17358 - DNA, 369 bp, Zea mays
  Clone ID: LIB84-005-Q1-E1-H10
gaccgagccgtcggacttgctcgtcagcccggataagataacgcccatctgcacgggccacgcgaagcgttcgagctcctcccacgggagccatggtcaccgccaccacgtccccgctcttctccctctcctccctccgcgcctccctcccttcccccacccgatttcacacgtctctctcgctccgagccctctccccacgtgctcgtctctctgccgccctccctttcgcctccccactcgtttcaggcgggtaccggacctgggcggcgacttcaatctcgtccgcgggaagggtgagaccgccggggctggaggtggtgtgcgaggccacgaccgggcggctgccggactccgttaagaagacgg

SEQ ID NO: 17359 - DNA, 366 bp, Zea mays
  Clone ID: LIB84-005-Q1-E1-H3
acttcagacgggtcagtggaatctttatgcccaaaatcctgattcgagtaatcatttatttggtaccactcaaggagcgggaactgccattctgacccttcttgggggattccatccacaaacacaaagtttgtggctgaccgatattgctcatcatcatttagctattgcatttatttttctcattgccggtcatatgtatcgaactaacttcggaattgggcacagtatcaaagatcttttagaagcacatactcctccggggggtcgattaggacgtgggcataaaggcctttatgatacaatccaataattcgattcattttcaattatgccttgctctaacttccttacgggttattactt

SEQ ID NO: 17360 - DNA, 383 bp, Zea mays
  Clone ID: LIB84-005-Q1-E1-H4
cgggtcgaggcacgcgtccagactgaatttgctcgagagtgagaggaaggcgtaacagtgtgaaggaggcgcgggggacaatatggctgccgaaatggtgaaagcggcgacgagcgacaagctcaaggagatggattgggcaaagaacatcgaaatctgcgagctcgtggcgcaggatcctgggaaagcgaaggatgtgatcaagtctgtagagaagtgtatagggagcaggaggaagaccagtcaactctttgctgttatgctattggagatgcttctgaataagtgcggagagcctgtccataaggaggtcattgagaaaggccttcttcgaatagttgtgaagatagtgaagaaaaagacggatttaccagttcgagaaa

SEQ ID NO: 17361 - DNA, 264 bp, Zea mays
  Clone ID: LIB84-005-Q1-E1-H5
tcgcgggtcgacgcacgcctctaaagagtatctgatcatatatgtattccaatacggaatgaggattttcaatgcgggatataaaaacatatctctctgtagcacccgtgctaagtactctatggtttggggctttaccacgtttattgatacaaatcaatcgtttattcccagatgctttgtcattcccttttttttaattcgagttattcctatgccagagatagaattcttcctgagatcacgaacatttcccctttttga

SEQ ID NO: 17362 - DNA, 348 bp, Zea mays
  Clone ID: LIB84-005-Q1-E1-H6
caagtacgagatccaagggttcccaaccatcaagatattcagggaccaggggaagaacattcaggaatacaagggccctagggaggctgatggcattgtggattacttgaagaagcaggttggccctgcgtccaacgagatcaagtcaccagaagatgcgacggcccttatcgatgacaagaagatctacattgttggtatcttcgctgaattcagcggcaccgaatttacaaacttcatggacgtcccagagaatctgaggtctgactaccactttggccacactttgcatgccagccacctcccacgtggtgatgcatcagtggaacggccattggtcacgctgct

SEQ ID NO: 17363 - DNA, 408 bp, Zea mays
  Clone ID: LIB84-005-Q1-E1-H7
agacactgcggccgggcgatggcgagcgtggagggcaagagggagacggtgctggtcaccggcgccagcggcttcatcggatcgaccctcgtcggcctcctcctcgaccgcggctacaacgtccatgccagcgtcctcaaccccgatgacaaggcggagacggagcacctggtcgccctgggcgccggcgccggcgaaggccggctgcgcgtcttcccgggcgacctcctcgacggcgccgcgctcatggccgccgcgcggggctgctcgggcgtgttccacctcgccagcccctgcaccgtccaccccgtgagcgacccgcaggggcagatggtggtgccgggggtggaaggcacgctcaacgtcctggcgcgccgccaagggagcccgcaccgtgcggcgggtggt

SEQ ID NO: 17364 - DNA, 414 bp, Zea mays
  Clone ID: LIB84-005-Q1-E1-H9
cgcgtcggcccagccgtccgcccacgcgtccgcggacgcgtgggttgagacgcttccctctctctcttgttcttctcgccttctgccggagtgatggccagcctcaccgacctcgtcaacctcgacctgagtgactgcaccgacaggatcatcgccgagtacatctggattggaggatccggcatagacctcaggagcaaagcgaggaccgtgaaaggccccatcaccgacccgagccagctgccgaaatggaactacgacggctccagcaccgggcaagctcccggagaggacagcgaagtcatcctctaccctcaagccattttcaaggacccgtttcaggaaagggtaaccacatcctttgtgatgtgtgactggctacacccacaaggcgagccaatcccaaccaacaag

SEQ ID NO: 17365 - DNA, 425 bp, Zea mays
  Clone ID: LIB84-006-Q1-E1-A10
gcagcagcacacagccccatcccaatcctagtcgatcttcttcccctcctcaagccggttccttcgtccacacgaccgcgcgctcggaaaactccgcggagggcgaaggaggcgaaccaagggcgacgtatccgccgccggagaaggtagccctcgatccgccgtctcccgcgattcgtttgtcttgcgacagctgggcgaccgtcgtcgccgccgcccttctccaggtgcccaggtcttcgccggtccctttgccgcctccttgccgccgacgagcaccagccaggaagaaaagaagctgaaccatggggaagagaaagtcagctgctaagccacctcctaagaagcggatggacaagcttgacactgtcttttcctgcccattctgcaaccacgggagtagtgttgagtgccgaattgacatg

SEQ ID NO: 17366 - DNA, 413 bp, Zea mays
  Clone ID: LIB84-006-Q1-E1-A11
aactccaagtaaatgcaagttcttcatgtggctcgtggcccacgatcgctgctggacagcagaccgactagcaaaaagaggactgcctcaccctcaattttgtatactttgtgatcaagaggaagaaacgataaaccacttgctggtttcctgcgttttctctcgggctgtctggtttcagatgatgaaatctgttgggttgcagcatcttgctcctaaccctgcgtgctcctcctttgaagattggtgggaaggggttgctgcattttctgctggtctagtaaacacagggctgcacaagggcttgaattctttgatcattattggtgcttgggccatctggaatcaccgcaatagctgtgtttttaatggtgtgcagcctagtcaaagcatggtcatcaattgggtcaagg

SEQ ID NO: 17367 - DNA, 451 bp, Zea mays
  Clone ID: LIB84-006-Q1-E1-A12
ctcgcgggtcgacacaagcgtccaaacacacgttctgaccaacgcgtccggtaatgatggataggaactccatctggttttgtcaaggtccagcagccaaaaaactgaatattgatttgccagaaactgaaattgtagaaacacacaggaaccatagtgcaaggatcacttgtctgaggctatttcctctgattgataccccactgtttcgaagtgatacacaaaaaaatgaaaaagcattagtcacttcaagcacagacagaacaatccgtctttgttggaagggttattcacgctgttacaagggccattcagcgcctgtgactgctctggctgacagattgcttatggatggtgaatctaaactgcttgcaagtggaggggaagactgcaccattcgcctatggtctatgagtacgaaggcgaaaaatcacccactgctagcaacatt

SEQ ID NO: 17368 - DNA, 295 bp, Zea mays
  Clone ID: LIB84-006-Q1-E1-A2
acgcgtccggaagctataagtgctacagaggggttgatacaaaggaatggaagtgattgacacgggaactcctctcagtgttccagtcggtggagctactctcggaccaagttttaacgttcgtggggagcctagtgacaatttgggtcctgtggatagtaatgcaacatttcgtattcatagatatgcgcctgcctttaacgaattagatacgacattatctatctttgaaacacgtattaagggggtcgatcttttaactcctaacgacgtggacgaaaaatcagactgtttg

SEQ ID NO: 17369 - DNA, 250 bp, Zea mays
  Clone ID: LIB84-006-Q1-E1-A3
tgggttccaaactcagggcttcccatggttgccatccacagtaaatggcacacatgggttctgttgcatcacttgcgatgtcagtcactataaacgaggatgaggaggaagatggggataccgggagtgatcaacaaccgaaaggcaggaagctgtgggggcttgtcgtctgccatcatacaagcccgaggttcgtccctttcccactaaggtatgcttgcgagtttctcttgcaagtatttggcagaca

SEQ ID NO: 17370 - DNA, 396 bp, Zea mays
  Clone ID: LIB84-006-Q1-E1-A8
aacacatgcttcagcaacgcacggaagccagctcttgtctgttccgactgcttctccatgcgctcctccctgctgccgctcgcgcccagctccatcttctcctgagcgcccagccgaggtccctgtgccatcgccgcgctccagctccatctcgccatggccgccgcgcctgctccctggccggcgctcggcttcgaactcgccccatctccctggtcgcgttggttttctgggcgtgtctctcttccctgctggcagccacgctaatcttcctggccgcgacctcgctttgctctctacgtcgctgttcgccgggtcaagcctcatgttgtcgcgtcctatttcctgctcgccagtgtgccctcttggctcgctcggctttaagtcccaatcgcg

SEQ ID NO: 17371 - DNA, 417 bp, Zea mays
  Clone ID: LIB84-006-Q1-E1-A9
agactcgccgctgacgaagacgatgaagggtgcggtgacaggactcgccgcggggaccatctggggcaccgtcgtcgccacctggtacgacgtgccccgtgtggagcgccacgtcgcgctccctggccttatccggacgctcaagatgtgcggcacctacggggccaccttcgccaccatcgggggcctctacatcggcgtcgagcagctcgtgcagagccagcgcaagaagcgcgacttcgtcaacggggccgtcggcgcgttcgttgccggagcctctgtctgcggctacagaggaaagagtattcagtcagccctcatcggaggctcctgtctggctttcacatctgctgtgctggacattggcggcaatacgaccagagttgacaacggcaaagagtactatgcctacacaac

SEQ ID NO: 17372 - DNA, 362 bp, Zea mays
  Clone ID: LIB84-006-Q1-E1-B1
aggacgcatgggcgcggggctgaccccgtgcaaggagtccaaggcgttcgcgaagcgcgagaagaactcgatcaagaagctcaccgcgtcgctgaagaagtacgcgcccgacagcgcccccgcgctcgccatcaacgccaccatcgagaagaccaagcgccggttcgagaactacggcaagttcgggctgctgtgcggcgccgacggcctgccgcacctcatcgtcagcggcgaccagctgcactggggcgagttcgtcaccccgggcctgctcttcctccacatcgccggctggatcgggtgggtcggcaggagctacctcatcgccatcagcggcgagaagaagcccgccatgagggaga

SEQ ID NO: 17373 - DNA, 374 bp, Zea mays
  Clone ID: LIB84-006-Q1-E1-B11
agagatatgattggtgttggtgcgctttcaacaaaagaaactgagataaagtgtataaaaggtacaaaaactctttggtcggatcgtgtctctggaaaggttactgtcttgggaggcaatgcaaatttctgggctgttggatgcgaagatggtttcctgcaagtttacacaagatgtggagtgcgagcaatgccagcagtgatgatgggatgtgcagctgtttttattgattgtgacgagtcctggaaattgcttcttggcacaaggaaaggtctaatgtacatatggaacctttatgataggacctgcattttgcaggactccttaaactgcgttgggtgcatcgcgagatgagtgagctgcaagaaatgctg

SEQ ID NO: 17374 - DNA, 148 bp, Zea mays
  Clone ID: LIB84-006-Q1-E1-B2
cgtacgtagtgcaacgactgtcgattcgttgggtgaggaacatatatgtgaatgcaaactccgggctacatacatgtgtaatgtgtaatacatatatatacaaaactgccgaggcgccgacaatactttaataactgggccttttaat

SEQ ID NO: 17375 - DNA, 241 bp, Zea mays
  Clone ID: LIB84-006-Q1-E1-B3
atcccacatgagattgctaacatcgacaagagaggggcacggaaagacaaggagaacaagcctgagatcctggtgatccagggaccgaaacctgggaagccaacgggcatggcaccgatgccgcagatattgctgaagctgaaacacactcgcccaccacacaggaaaccaactccgccacctgccgcagctaccggaaacgatggagcaccaactgccgccggaaggatggagctaagcc

SEQ ID NO: 17376 - DNA, 417 bp, Zea mays
  Clone ID: LIB84-006-Q1-E1-B5
accacgcgtccgcccacgcgtccggtttgacaaagtttgtcagtgacctattcttggttggactgttctaccatctgtataaccagattgctacaaacaccttggagcgagtggctcctctgacacatgctgtcggcaatgtgttgaaacgtgtttttgtcatcggtttctcaatcattgtttttggcaacaaaattagcacacaaactggaattggcacgtccattgccatagctggtgttgctatgtactcttacattaaggctaagattgaagaggagaaaaggaaaaagagcgcatgactgctgtgaataatattatcgagaccttcctcggacacaacatcgtcgacaatcacgacctacttctatatcgtgttttgttttcatcttgagtcagtcggtccaatgtttggtc

SEQ ID NO: 17377 - DNA, 327 bp, Zea mays
  Clone ID: LIB84-006-Q1-E1-B6
agcagtgccacaggtacgcctggaaaccctagccttgacaccttgatgagcatgctcattgggcgtggttcgggaggtggcatatgtgttccaagtacttccaatgtgccaccggcggagctccatgccacacagcttatacagctcaaagaaatgggtctcattgatgctgctgagaacatttcagcagtgctcgctaccgctgggaatgtacatgatgcggtggagcgtcttctcgggaaccttggggagtagctaaaaccagcgatgccacacaccgccagtaaatcttaaaatgtcgcgcatctgcacgagtgttcggcttaa

SEQ ID NO: 17378 - DNA, 209 bp, Zea mays
  Clone ID: LIB84-006-Q1-E1-B7
agccttgaaattctttgcatctgtccgtcttgagatacggctcattgggaagataaaatctgccaacggagatgaagatgttggtgtgaaggttcgtgtcagagtgcagaacagtaaagtatctagggcctacaagcaagctgaatttgaaatcagttttggggagggtgttagtaaattggggtgcgttcttgattgtgctgaactga

SEQ ID NO: 17379 - DNA, 335 bp, Zea mays
  Clone ID: LIB84-006-Q1-E1-B8
actgcttcttcggttttcaggagcgtcggccattgctgctggaaaagcagaccattgggactccctcgtgcgttttccaaatcagtcaggttgatggcgatggagggaccagttttatgccgccctgcaatgcaagccaaatcgcctgctgctgcgctggtcaacaactccctgaccagattcgggcagcttgggaccatttcaaaatacaggaacgtttcaagattcatttctcccatctctcagccatctaccaagaacataggtccatgctgtgacttcagctcgtcttctgaaggcaatggatacatggctgggaactttagcgacagtga

SEQ ID NO: 17380 - DNA, 426 bp, Zea mays
  Clone ID: LIB84-006-Q1-E1-B9
atacaccagaacaactgtctagtggaggtgaaaatgagaaatcttcactatctgagagtgaaaagaatgatacaccaagagaaggtgctaaagagacaacaagtaaactttctgctgctgcggctccattcaatccatccagcgtaccagcttttggttcaatggctgtcccaggtttcagagaacatggagggctattgccatcaccagccaatgtgccccctatgctgtccatccctctccgcaagcaccctcaccaatctgcaactgcaagggtaccttatggtccacgtctggctggaggctacaatagatcagggcaccgaggacttcgtaagaagcctgtgttgacaagtggtgaggcccctacagaaacaaacacgtctggccccaggattatgaaccctaacgccccagagtttgttc

SEQ ID NO: 17381 - DNA, 307 bp, Zea mays
  Clone ID: LIB84-006-Q1-E1-C1
agctgatcgtcaagtggacgtcatctaacaacactaacctagtgttactcacgatcactcttcggatgacaaagtcgacgatgaaccccatggagtaaacgacgacgttgttgtatccaccacatggagacgaatgacgacaacggcacaacggcacgagcagaaaggcttggccagggcacagtccgagccggttgacggcgagcccgaccgtcatagatcaaggctgacgctgacggacagtgaccgggccacaagcaagctgccccaactgatggcctgggccatggagagcaagggatgggcg

SEQ ID NO: 17382 - DNA, 378 bp, Zea mays
  Clone ID: LIB84-006-Q1-E1-C10
aaccacgcgtccgcccacgcgtccgggatcgaggtgctcgtgatcggctacatcgagttccagcgcaacgccgagctcgacccggagaagaggctgtaccccggcggctcctacttcgacccgctcggcctggcggccgaccctgagaagaaggagcggctgcagctggcggagatcaagcacgcgcggctcgccatggtcgccttcctcggcttcgccgtgcaggccgccgccaccggcaaggggccgctcaacaactgggccacccacctgagcgacccgctccacaccaccatcttcgacacgttcggagggtcctcttaagcccgccattgctccgccccgtccatcgagcggccggaacgtgttcttggatta

SEQ ID NO: 17383 - DNA, 158 bp, Zea mays
  Clone ID: LIB84-006-Q1-E1-C11
accggacgcgtccgcccacgcgtccggcagcactgcgagcccccacagcggcgctacccgctcgagaagggcgttcctccacgttggtggcctaccggcaacaacaattggtggccgcaatccggaattccaatggccaagggccaacccccttcaaa

SEQ ID NO: 17384 - DNA, 159 bp, Zea mays
  Clone ID: LIB84-006-Q1-E1-C12
cagacacgtgggcggacgcgtgggcgccgccatgcatcatcaccagcagccgccgcagcagcaccacagctcggcgtcagcggactccgacgacgcacacattccatgggttctcgggggggaggttcagcagcatcatcatgtacctgcatggaagcg

SEQ ID NO: 17385 - DNA, 264 bp, Zea mays
  Clone ID: LIB84-006-Q1-E1-C3
gtcgacggactcgtcggaccactagtccgcccacgcgtccgctttaacaagcttgtctctgaagtgaatgctgctaccctcgatactgatctaaatgttgtggtggctcctccattcatctatatcgattaggtcaacaattcactaacgggtcccattgaggtttctgctcacaatgtgtggattgggaaacgaggagcctacacccgatagatcagtgcagaacaactgggggacatcagttgtcaatgggttattcttgga

SEQ ID NO: 17386 - DNA, 387 bp, Zea mays
  Clone ID: LIB84-006-Q1-E1-C5
aggacgcgtgggcacggccgagccccgacattctaccgcactccctccgctgcacccctttccattctaccgccggcgacgccaaagttcttgggcctcctcatcggcgacttttccgccggcgacaggaaacaacgaaccaaaccacttctctgtccagaggcgtcccgctcctctcttcgccccctgctgttgaagatgaggaacctcaagttcaatgagcagaacctcctcagaagggacaatttcttggagtacaaaagggagggcggccaccgcaaggcgctcgtaacacagggctacggccccttggaaagggacgactacaagaagtacaatgggatatgcttaatggtgcaaaagctcgttaaaatcataaagcagatg

SEQ ID NO: 17387 - DNA, 288 bp, Zea mays
  Clone ID: LIB84-006-Q1-E1-C6
acaggataagtctaagctcacggggttggccttcggtcctagttatcagcctgccccttcaacaaaaggaaagccatccaagttgcataaaaggaaacatcagattggttctctgtactttgagatgaagtcaaaggagatggagcttgcggagaggcgttctaagggcattcttacgaaagcagaagctcaagcaaaatatggctggtgaggagggatgtaaccgaactcacgatacatgtgtgggaaccgtagaattgagatgcgtgaaattttgttgcacatttt

SEQ ID NO: 17388 - DNA, 364 bp, Zea mays
  Clone ID: LIB84-006-Q1-E1-C7
aatccgtaccaaaacttacttggatggagcaatacttaaagaggaaatggagcggtctgctgatgtgctgtctgctggtctattagaagttgcaaatccttctctctcaagtagattcttcctaaagcagcattggactgatggataagatgatgtaaaagactctattaagcacaggcccttgtgggaatcttacatgcccaaaaataataaaggaaggagaggaactggaaagaagaaacatggaagtctgtacagaacttatgggagcagagtgatcccagtttttgtattatcactgggcggtgtcgatgctgaacttctcatggaagaggagattcttgtttggacaagtaaagatgtt

SEQ ID NO: 17389 - DNA, 78 bp, Zea mays
  Clone ID: LIB84-006-Q1-E1-C8
atttcgctgtgaattggatgtataactttgaccattgatatcttggttaatcagacggtgcattgtaatcctggcctc

SEQ ID NO: 17390 - DNA, 423 bp, Zea mays
  Clone ID: LIB84-006-Q1-E1-C9
accacgcgtccgcagcggcatgcttctgtcggcctacaaggagatggtccgtcagctgtcctacttggttgaagcttcccattctatgcgccgtttttctaaagcggctccaaattgccccatcacacagttttctgaccgccaagataatttgaatgattcaggggatggtggaggagccccagtattcaaatggttctctgtattagaatttgagagtcttgcccaggagcttgttcagatgtttgtttcagagcaaaagttgaagaggctgctactcttggaatttctctcgattgctttaaaggaaggtgtagaactccagacatcattaaattggggtgatgaactatatgatggtgaatcaaataaacttcagagtattggccttcagtcaggagatgcctactcaccgcctgaaaa

SEQ ID NO: 17391 - DNA, 303 bp, Zea mays
  Clone ID: LIB84-006-Q1-E1-D1
agctcttacaagtccgcgttccagcgccaggttgtcccgagcagccgggcgtcgtcgtgcaggtccgtccgcgcgcgctccgccgcagccgccgcgccagctgctggaggcatctccgggcatagcagttacacggttggtgacttcatgacaagaatggacaatctccatgttgtccaacctactacaccagttgaccaagccctggagctgctggtgcaacacaggatctctggcttccctgtggtttgacatgactggaacctggttggggttgtctcagattatgatctcctagctttg

SEQ ID NO: 17392 - DNA, 403 bp, Zea mays
  Clone ID: LIB84-006-Q1-E1-D10
acgcccgccgcccggtggtccacgtcccctgtgctcttcctcctgctgctgctcgcggcggccacggcgacgacgacgacgacgaccactacagcaaagcatgagcatccgtcgccgacgccgtggccggagcgtttccacgcggtgctgttcacgaacctgaccaactacacggaagcctccacgggcccgccgctgcgcgtgacggacctctactacgactggccgcggcggcggaacctgaacctggtgcggcaccagctgtcggtcgacccgctgtacgacgtggagtggaacaacggcaccggcttctacttcgactccaatgcgtgccgcgtggagcagttccccgtgggcgtgctgccgccgtggtggctctccggcggcggcgccgagtacgtgg

SEQ ID NO: 17393 - DNA, 405 bp, Zea mays
  Clone ID: LIB84-006-Q1-E1-D11
aaggacgcgtgggctcgccctcgccctcgccctccccgcaggaatctctgtctgctgtcgcggacagtgtgaaggtgctcaaagtggcagccaagaagaggaaagtacctgctccggaaattctctcggcgctgtccaagatcaagaaggcaaaactcgacacatcggcgttctttgagacactcggtggtaccgactctccaggcatgacctggatgcttatcttcactgcaaacggtccgctggagaaagggcactatttcccagtgacagcagtccaacgcttcgatgctgccgggaaacgcatcgagaatgggatatatttggggcccatcgggtgcttgaccttcgaatggaggctgtcattgaaaaagaaaatactcgcgttcgtcttcaagcgggttc

SEQ ID NO: 17394 - DNA, 257 bp, Zea mays
  Clone ID: LIB84-006-Q1-E1-D2
gtccgaccacgcatccgcccacgcgtccgcccacgcgtccggacaacatggccgcctccgcctcgaccgtctccggcctcgccggcgcctccctggccaaccgcccggcgttctccacaagcttcacacagggcagccgggtgtctgcgacgaagcccctgatgagcaggaacctggagaggaaatggaggatgaactgcatgacgtttccccgggacgggctgcagagggaccctagcgtccaccggttcgggctc

SEQ ID NO: 17395 - DNA, 379 bp, Zea mays
  Clone ID: LIB84-006-Q1-E1-D3
cgtccgaggacgcatgggcgcgacctcgcctagcggccaaaccacgctagagttcgcagttggcaaaggggaggaggacgaggacgagatggcgagggatgacgggttcgcggtgtgggaagcggcgctgctcgctggcgtggctgccgtcttcgctgcggggctggctggcgtctagatctccatgcctcgctccgactacagcttcctcaagctcccccgcagcctcgacgagctccaagtcctcactgttcatctggagggctacagcagtgactacagcatccaggtgctggtgggctactgtgcccttgtcatattcaggcagacgttcatgatcccagggaacattttcaggtccctggctgccgggggccct

SEQ ID NO: 17396 - DNA, 372 bp, Zea mays
  Clone ID: LIB84-006-Q1-E1-D4
ggggcgcccatccagcgccagggctccttcacgctgccccgcacactcagccagaagacggtcgacgaggtctggcgcgagatcgtgagcctcaccagcggcgaggacgcgcatcaggttgcggctcccgctcccgctcccgcgcccgagcccgagcccgcgcccgcgcccgcgccgctgccggcgcacgcgcaggcgcagcagacgctggggtccatgactctggaggagttcctggtacgcgccggcgtggttcgtgaagacatgggggggcaccagaccctcctgctgcagccgcacgcgcaggggcttttctcccaagggaatgccgtcgcgccgcagaccctgcagctgggaaacgggatggtggcc

SEQ ID NO: 17397 - DNA, 356 bp, Zea mays
  Clone ID: LIB84-006-Q1-E1-D5
aggacgcgtgggctgcagttgctcgttggggtgccaccactgctgatattctcaggtgccagtgctgtatttggtgcatatgcacttccaaggtttgttcagctcacagtgacgtcttactacgcggcatcaactggctcgcagtatgctgtttcacagatcacacggcagatcgaaagagctcattttccagaatcagcccaggaatctgagtgagttggttggcattcagtctgttctattgggggtgcaatgtacatggtatagaaagacgtttagtgctgcttttgccgtgttgcagtacagtattaagtttactgtgtttcagacagcacccagtgaataaaagttatatt

SEQ ID NO: 17398 - DNA, 378 bp, Zea mays
  Clone ID: LIB84-006-Q1-E1-D6
agctaatgctagaagctaatcctatttttgggtgctttttcctcctatgattggcatacagacatgcatatggatattgataatatgtattatgaggtactatcttttatcatgtcttatcctgcctagatgttggatgggttttgttataggattatttactttgtggaggattctgctcggcgtgtgaacctctgtctccgcgctctcgcttgactgttgatttgactaatttggttgcttagatgtggctcttattaaaaaccatatgtggataggcttgcactacatacacggtggcatggtaaacgttgtgaccacgctgtgataatgcatggattccatcagttcattttattcgtcaattgatcatgggtg

SEQ ID NO: 17399 - DNA, 402 bp, Zea mays
  Clone ID: LIB84-006-Q1-E1-D7
aacatctcaagtgaagagaagtagaactagtggagagaggagaacaggagattagatcagctcgcacgcaagccaaaggaaaaggcaagatgcggagcccaaggggtggaggcggcctggagcacgtggatctgattcccggcatccccgacgacgtcgccgtggactgcctggcccgcgtcccgcacgcctcccaccgcgcgatgcgccgggtctgccgcggctggcgtagcgccgccgcggcgccggccttcgcgtcggcgcgcgccgcggcgggcgccaacgaggacctggtgtacctgatgcagttcgggaaaccgtccgccgacgacgggcccaatgacggcgacgaggggcccggcaacgccccggcgtacggcgtggcggtgtcaacgtgacgac

SEQ ID NO: 17400 - DNA, 191 bp, Zea mays
  Clone ID: LIB84-006-Q1-E1-D8
atctgacaatgccctgaccgccgcggaatgtcacgccagcggagaccgacatctactccaatccgagggttcttgccccgatgccgtagaagtacgcgagggggacgaagaaaaacattggccgttaccacgtgagcgagccaccagttgaccaattgcgcgattcaccggacaagacagagaaggatgtc

SEQ ID NO: 17401 - DNA, 411 bp, Zea mays
  Clone ID: LIB84-006-Q1-E1-D9
atggcgaggaaggaagataaactcaaaatcaaggatgagtacaacaattatagggataggacagcctataagtttctgttatttccatctatcctcctcctactgagatggtggatatgggatggatgccttccagcattggctgttcaaatttaccaggcttggttactatacctgtacacaagctttgctttgcgtgagaatgtattaattgcgaatggaagtgacattcgtccatggtggatatatcatcactatctagcaatgctgatggctcttattagccttacatgggagataaagggacagcctgattgttctagcaagcagaggggggtgcaacttttcttgcgctgggcaatcatgcaaggcattgcaatgcatctacagaatagatcccagcggcaaaga

SEQ ID NO: 17402 - DNA, 410 bp, Zea mays
  Clone ID: LIB84-006-Q1-E1-E1
ggaaatcaatacaatacagtgggtccaagatttactgttgtgaatccaactgaaagctttgatccacaaaagatgatacatcaagctgcatatccatctgatcagaggcttccacttccaagaactggctttcctaattctcctacatccagaagaggagggactgttccaaattatcaaggcatatcatcctatgttggagggccgatgacttatccgacaagtccagtgtttcagggacaaaccttgcctggagtattgcctcctgatacgagaaatgaccctgttggatttcagtccccctcaagaaacatcaccggatagtcctgagattcaaaggcagcgagacagacagaagtttggtgaatcaaaaacttgctctttcttagaagagttgaagtccaacacaa

SEQ ID NO: 17403 - DNA, 405 bp, Zea mays
  Clone ID: LIB84-006-Q1-E1-E10
aggacgcgtggggcggaggaggcggcggcggcggtggctgcttcaagtgcggcgagcctggccacatggccagggactgctccagcggcggcggcggctacggcggtggcggcggcggtggtggtggcggctgctacaactgcggccaggccggccacatggccagggactgcccaagcggtggcggcggtggcggagggaggttcggcggcggcgggggtggaggcgaccgctcctgctacaactgcggcgaggccggccacatcgcccgcgactgtcccacgtgaggtgtgtccgcgtccgtccagccagccagatcggatcggatcgctccaccacctgctggtctgatggcgccgcccccttctagatctcgcttaaaagaacatcgccctctccctgtgt

SEQ ID NO: 17404 - DNA, 414 bp, Zea mays
  Clone ID: LIB84-006-Q1-E1-E11
accacgcgtccgggggaagttcttcaaaatagtgaggcttggttggagactatggttggtttcagttgctatcggccttgtgagttggcccctggcttatgtgggtaaatttattcctgtgcccgtaagacctcttccggactatttcaagccccgctgttgtcggaaaccgccgcgccgagacgaggaggaaggtgggcagagctaaagcgcaacgagtgggcagtgtaaataggcacgtgataaaaaaatggagataaattgcactggttgattccatggtagcagcatcctggggatgtacgcataagatggcaggtagtcggcctcgtcgttttcttctaggagaagcagtcggaagaaaagaagtactatacagaagccaaacttgtctaaccctatccagctggtgtg

SEQ ID NO: 17405 - DNA, 335 bp, Zea mays
  Clone ID: LIB84-006-Q1-E1-E12
aaaggctgtgtgcgtcctgcgccgataacgcgatggtgtccattgtcaccgaggtatgggcgctcgctggatgcggcccagcgtccaaggcggcggcggtagcggtagcggcgcatgagttgccggcgcagcatccttctcctgccgcagcgggaggagggaacgccaagaacagagccgtgccagtgtcgttcagaggcgtcagcagcggcggtggccaggaccagcagcgtgaggccgccgccgtcttcgtcgggcggcggcgcggcctcgcctcgtgcgcgctcagcgccgtcgccgcctcgttctccgcccgcgctggccgccccgcgccg

SEQ ID NO: 17406 - DNA, 194 bp, Zea mays
  Clone ID: LIB84-006-Q1-E1-E2
gtccaccgacccgtctgatgacgaatgggctgcttctccccacggcgcacgcgcgcaccatcttctgcgcgccgccagccccgcttgttctggcgcccgggcgccgccagccgtcaggccgtcaccgagtggggatccttgggcacctgcacgcccccagcccgtcaacgcttggagacccgcgcaaccgcggc

SEQ ID NO: 17407 - DNA, 382 bp, Zea mays
  Clone ID: LIB84-006-Q1-E1-E5
gcgagctcccagtctcccactccatccatggcgatcgccaccactacctcttcctcctcgctgaccattcgtctcctccacccgaaccccaacactaaccccgctcccagatctctccagctcctcagtagcaggaggtgcgctcgtgccgccgtagccggaggcgcggtgccttacggggctgctccccggcgtgggatttggtcgatcagggatgacttggtggtgccgaggtctccctactttccagtggattccgcggcggggcaagagcgtgggccgtcgcccatggtgatggagcggttccagagcgtcgtcagtcagcttttccagcacaggattatccggtgcggtggtcctgttgaggatgatatgggcaaca

SEQ ID NO: 17408 - DNA, 321 bp, Zea mays
  Clone ID: LIB84-006-Q1-E1-E6
acgagctacaggatggcgacattatcaacatcgacgttactgtctacttaaacggataccatggggacacctcgaggacgtacctgtgcggagaagtcgacgacgcaactaaacaactcctgaagggcactgaaaagtgcatgatgcgcggcatatcagcctgcacgcacggcgccaatttcaaggaaatctgccaaagaataaatgagcacgcggagaaatatgggtacggcatcgaccccttcctgggggacggggttgggaggatgttccactgccagcccatcatatgggatagctaccattacgagccccggttca

SEQ ID NO: 17409 - DNA, 191 bp, Zea mays
  Clone ID: LIB84-006-Q1-E1-E7
aaatccatggaccatgcatggtgctctggtcgatgccgtacgtgtgtcactgatacaatactattttagtactgatgctagtcatcatatatatcgatcgagctcgccactgcgaagtctgagataatgcatgtatgcttgacggggagatctgaggaaagataatttctatatatgcatgtttcgaagaa

SEQ ID NO: 17410 - DNA, 424 bp, Zea mays
  Clone ID: LIB84-006-Q1-E1-E9
ggcagcaaagagctgtctgtactggtagacaggtcaattggaggttccagtataaaggatggacaaatagagctaatgctacacaggaggctactccatgatgatgggaaaggcgtcgccgaggcgctaaatgaaacagtctgtctcgataagcaatgtgaaggactcattatacaaggaaaatactatgtcaaaatagacccacaaggagaacgagctcggtggcgtcggacatttggccaggaaatatactcccctctccttcttgctttcacagagcaggatggaggcaactgggcgaattcacatgttgcaaaattctctgcgatggattcaacttacagcttgcctgataatgttgcaatgcttacccttcaggagcttgaagatggaagtgttctccttcggtttgctcatctatatg

SEQ ID NO: 17411 - DNA, 414 bp, Zea mays
  Clone ID: LIB84-006-Q1-E1-F10
aggacgccataccctagattggagcgcaccacgggcgccggcggccggcggcccgccaccggtgattgacgccccctcctcggtccccagcgcggcgagcaggctatttgaggagatgccgtcattgtcatccttactctctggctccaatactgcgagtgctgagcttcctctaatcccttgcaagctctgcaatggggtggtgattgagcgggtctccaaacaaccagaaaccacgtcgaggaagttctaccggtgcagagccaagaaaacggatgggtcttaatgtgattttttccactggcaagcgagctatgttgttttgttaatcgacgatgggtttgtcagtggtgatcgacgccttgagttgttaatgatcgcacttaatgatcatggcaaagccgttgaatctct

SEQ ID NO: 17412 - DNA, 417 bp, Zea mays
  Clone ID: LIB84-006-Q1-E1-F11
gataggtgtaaacacagctatatactcgccctcgggagcatcatctggtgttgggttttccattccggtcgatacagttgggggcattgtggaccaacttataaggtttggcaaggtgacaaggcctattttgggagtaaaatttgcccccgatcaatctgtggagcagcttggattaagtggagtgcttgtcctggatgctcctccaaacggaccagccggcaaagcgggtctgcagccaaccaaacgagatccctatggtcggcttatcctgggtgacataattacctctgtgaatggcacaaaggtgacaaacggaagcgacctgtaccggatactggatcagtgtaaagtcggggaaacggtgaccgtggaagtcctgcgtggcgatcataaggagaagatccccgtggtcct

SEQ ID NO: 17413 - DNA, 405 bp, Zea mays
  unsure (1)..(405): unsure at all n locations; Clone ID: LIB84-006-Q1-E1-F3
gacaacctgatcaggttcagcattggagtggaggattttgaggaccttaagaatgatcttgttcaggccctcgagaagatataagctccaatccatttgcattaataaagttatgaggtgatggttgtctggatcttgtagagatttgtgatgatacatgagctgttgactgcgattaagttctcttgtgcttattttattctttgaattcaataagctgtggttgctgcatcttgcatgtagtgttggacttaattttacttgtcaaattacaatagtttggtcccatgtacttgtgtccgcgcctccgcggttgtgcccctagtgtttttgtgtcatttgctgtgtantgtgagattaaggcacgatgtccttaatcaccataataaatccatgccttaaatg

SEQ ID NO: 17414 - DNA, 284 bp, Zea mays
  Clone ID: LIB84-006-Q1-E1-F5
agcgtgggaggagcttagagccaagttggaagagaaagagtggatctcgcagaagcagatgatcatccttctcaaccaggccaccgatatcatcaacctctggcagcagggtggtgggaacctgtcgacatgagtccctccccgccctgttctttcaaccgtgcaaagcttgcgttttgttggtttcactacaggctctctctgttgttaatgttaaaagtatggtacatggccttgtagatcggttcaaactgttctcaggtatggccttttccatggaaaaa

SEQ ID NO: 17415 - DNA, 343 bp, Zea mays
  Clone ID: LIB84-006-Q1-E1-F6
atttttcaacaaccgtttgtcacatcgttccttgaccgctacagaggaaaacgtgttccggtttagcttagtcctgctatatttcaacatacttccctcagaaatatcatgcggttatggatatgttccgtccttgcctttttctttaacttgtttaactgggtgtaagaaatttgttgttggtgtgtaaaataaccctcaaccgtgggtttccacagaccagaatgcattttccccgataatacattgaagaaagttctcatgcaagcctctttgtgggggaaaatgaagtcttaaggatgttctgaaagtagtgactacccatcatgtcctttgtaacatt

SEQ ID NO: 17416 - DNA, 325 bp, Zea mays
  Clone ID: LIB84-006-Q1-E1-F7
accacgcgtccgcgcaacgcgagcagcagttgcattggaggcgaggaggagccacgccggggctcaaggaatggccgctctccgccacctcgctgccggccccacctgccaccaccaccaccacggcgtcgcggcagccaccgcctccctccggctccatcgcctccccctccccttccgcccccttcgctcccgctcccgctccttcaccagggtttatgcgatctccagcagtgacatcagggtcggcaccaacgtcgaggtcgacggcgcgccatggcaagttctagagttcctccacgtcaagcctgggaaaggcgctgct

SEQ ID NO: 17417 - DNA, 185 bp, Zea mays
  Clone ID: LIB84-006-Q1-E1-F8
aaccacgcgtccgcccacgcgtcagcagggcgtccggccgggtccatacccgcggctaccgctgccgtcgtcgtcatcctcgtcagctggctacaggcactccaaatccgtgtccgtgaaaacactcgccctgttcggcaaatccaaaggcaagaccgcgcccgcgaaaaaggatctgcgtccca

SEQ ID NO: 17418 - DNA, 427 bp, Zea mays
  Clone ID: LIB84-006-Q1-E1-F9
cggcctgtccagcgccgagatcaccgacgtcgtgaccagggaccccaaagtcctctgctccgacgtggagagatccctcaccgctcgcgtcgccgagctcaccgacctcgggttttcacgtccggagatcgtccgccttctcatcgttggcatgaaccacttccgccatagctcgcttcgcctcaatcttgagttttggatctcggtctttggctctctcgacgagctcattcgggcgctcagaattaacgccgctctcctcagcacaaggattgaggaggtctgcaagcccaacttggagctccttcaagagtgtggtataaatgtttctgatctccaacagcttcatgtcccgtgtgctcaccagggaccctaagagcctgcaggaagctttggctcgccttcatgagttcagaatccagccggg

SEQ ID NO: 17419 - DNA, 297 bp, Zea mays
  Clone ID: LIB84-006-Q1-E1-G1
aacacgcatccgcctttgtgggctgcttcagccgtgttgatgcacaagtgggaggagacgcggcgaccgaagccaaacctgtggctccagacaccgtgggctcaacagcggtggttgcgcttgtctgctcatcgcatgtcatcgttgccaactgtggcgctttccgtggaccataaaccaaacacggaagatgagtatgcaaggattgaggcccacggtggcaacgtcatcaattgggaatggctatcgagtcccccgtgttctcgccatgtcccggtcaattggggacagatacct

SEQ ID NO: 17420 - DNA, 383 bp, Zea mays
  Clone ID: LIB84-006-Q1-E1-G10
ctcctcctcggcgccatctcgttgcccaccgtcggcatggtcgtcccctacggcgccttcttcgtccctgccggctccgggaacgccggcggcgggacctacgcgaaggacatgctgggcaacgacatcacggtggaggcgtggctcaacacgcacggtctcaacgaccgcacgctcgcgcaggggctcaagggtgaccccacgtacctggtggtggagcaggacaagacgctggccacctacgggatcaacgccgtgtgcactcacctcggctgcgtcgtgccgtggaacggttctgagaacaagttcatctgcccctgcgactgatcccagtacaacaaccagggcactgtggtccgtggaccgggcgcctctgtcgctgg

SEQ ID NO: 17421 - DNA, 406 bp, Zea mays
  Clone ID: LIB84-006-Q1-E1-G11
ggcgaggacgcccgcgccgccgccggaggtagcagtccggggtgcggtggatcaagcgatcccggagggagcggcgtcttctcacccggcttcggtttcgccgactcggatcttctcgcgcccgagcaggacaccatggatggaggcagttggtggtacgggaacgtccgcacgccgaacccagtcatgtcgcaggcggcgtccatatccgctagccccgggctaaccacctcagccaatcatgctcttgaaagcgagtcagactccgacagcgaatcactgtatgatgtagagggagttccatacgagcgaggtaacacatccattgagacgaagcgaataagaaggatggtgtccaatagggagtctgcgcggcggtctaggaagaggaaacaggcacagttgt

SEQ ID NO: 17422 - DNA, 424 bp, Zea mays
  Clone ID: LIB84-006-Q1-E1-G12
atcattttgaatttgaatagggtcccttgttttgaataggaactttctttctagtgctcatctgcacaaatagacagaagttgtacttcctagtgctcatctgcacaaatagaaatgattggatcacgtgtcgtttagaaaagatggaataatcctgaaacacactagactgaatcatctatgtgttgcatgacgtggactgtgtcgttcttattattacgcactaacatagctgaactaattctcttgacctcgagttgcctgggtgcctcttcaaccttcatgttcagaatagcatttgttgtgagatatcatctgttatcttggtatatgtcttcaggtctgctctcttggagcagacaaacagctcagagtcactaagttgtttggttaaatgtctgcaggatttaatgggggggtaaat

SEQ ID NO: 17423 - DNA, 392 bp, Zea mays
  Clone ID: LIB84-006-Q1-E1-G3
aagacgcgtgggaccaccgactcagcgagcgagagcagcacacactgcacgcagctagctaggagcagcagcagcggcggcgatggcggcctccatgatctcctcgtcagctctggcggtggcgcctcagggcctgccgcccctcggccgccgcgcctcctccttcgccgtcgtctgctccaagaagaagatcaagaccgacaagccctacgggattgggggtggcctgaccgtcgacgtcgacgccaacgggagaaagggcaaaggcaaaggcgtgtaccagttcgtcgacaagtacggcgcgaacgtcgacggatacagcccaatctacaacgaggatgactggtctcccaccggcgacgtctacgtctgtggaaccactgggcttctga

SEQ ID NO: 17424 - DNA, 132 bp, Zea mays
  Clone ID: LIB84-006-Q1-E1-G4
attgtcccgactcctgaaccctaccgatcttcccctgctgcagccatggtgaactccgcgggagctctccactgccgccggtcccacccagttctaccggtcccgcgcttcgctgggcaaccccgtgaatgg

SEQ ID NO: 17425 - DNA, 346 bp, Zea mays
  Clone ID: LIB84-006-Q1-E1-G5
aacacgcgtccgcccacgcgtccggcgatctcgcctcgagtaactagtgcctcgcgcgccgggggcgactgcgcgcgcggtcagtcagtcttcggcgtgcggggcgcgcgcgagatctcctcacgggtaggggagaaaatcggtgaaggtccgcgggccctgatgggcgggggggtctccggtggcgccgccggtggggatgcggcggcggcgggaacttagcccgtggttctcaacgtgtacgagcgtgacgccggtcaacaactagcgtccactggggcgggcttgggatcttgcactctggcgtccaagttcatggatcggagtacagttttggggcgcatga

SEQ ID NO: 17426 - DNA, 356 bp, Zea mays
  Clone ID: LIB84-006-Q1-E1-G6
cgagagagcgctggtcatggcgtcactgtctgtcgccgccgtggcggccaccatagcgatgccaagcagcaacggtgggagagggcgccgtctcagggtcgcgtccatgggcacccagaagggccagaagccgacgcccaagaccgtctcccgcacgagaagatctggcacgacgacagtgttcccggtgggccaacccggcccgcggccggcgacgacgagcggcaaagcgccggttaagctgctgacgaacctggacaacctgccgctgctgaccaaagcggagcgcgcgggcctgctgtccgcggcggagcgctcggggctgtcgctgtcggccaagggagccgctggggcct

SEQ ID NO: 17427 - DNA, 314 bp, Zea mays
  Clone ID: LIB84-006-Q1-E1-G7
cccacgcgtccgggccacactcgtctctctcacgagccacagcccacaggctagctctctagcggtctagccagtccacgcagcgcagggatggcgtcgttcgccgtggcaacggccccgtcgctagcggccccggcagccaacacgaggcccgccgccggcgtcacgtacgtggagggcatgaacgcctagagcggcctcaaggggctcaagaaggtgaccatgctcggggtgcgcaagaccgccgacgagtccttcgccaacgtcctggcgtcgctcagccccgcgggcaagaagcggggcggcagggggtt

SEQ ID NO: 17428 - DNA, 161 bp, Zea mays
  Clone ID: LIB84-006-Q1-E1-G8
aaccatctaccagcgactcagcgagcgagagcagcacacactgcacgcagctagctaggagcagcaacatcggcggcgatggaggcctccatgatctcctcgtcagctctggcggttgcgcctcagggcctgccgcccctcgggcgccgcgccgcctcctt

SEQ ID NO: 17429 - DNA, 420 bp, Zea mays
  Clone ID: LIB84-006-Q1-E1-G9
aggacgcgtgggttcgctttccgccaccgcccgatccccacaccgccacccgccgcctctaaccccgctgtcccgtcttgtgctctgacctcaccgctggtcagtgtcagaccgcatggaccccaccgaccagtcgccggaggaggtgtactccgtgtgggcccttccgccggagcccgtccgtgatcgtttccgccgcatcatggagggcctccgcgctgcatacggcggccccgcctttgagccgcacgttaccgtcgtcggtgacttccgcggacgccgctcggaagctgtcaaggtgctccgcgccgccgccgccagcgtccaaccctacactgctcgtgtcacgggggttgcccgtggcagcttcttctaccagtgcgtctacatccttctcgaccccaccgccgaagtggtggg

SEQ ID NO: 17430 - DNA, 224 bp, Zea mays
  Clone ID: LIB84-006-Q1-E1-H10
ttccactagaacgtggtgcatcagcatacctgctgctgccgccgccgccgccagttgtttgctgtggaaagctagatgcatgcgtgttgtaaaggaacctgaagcgttgcatcggtcatgattcatgcatggccagcctgctgcctgtaacaacaaactagtattgatcttattgagaccggaaactgtattgcacatggtaaatcaatgtacaattcctccct

SEQ ID NO: 17431 - DNA, 384 bp, Zea mays
  Clone ID: LIB84-006-Q1-E1-H11
acagcagagagattactacgatccaacagttctagagcaagagagaggaagacacaccgcagagttagcaggctaataacttgcaggagcagcaggaatggcggcgacgcgtcgcctctcttgctttctcctcgccgtgcttctggcaggagtggccgctgccaccgccttcgacgaagcggctgctgccggcttcgggcttggccacggcgcgcgtttcgcgcgcaagcatggacgtgctgccgctgagatgccccagccggagccacaacctaaaactaagccggagccgcatatgcagccactgccccagccagaacctaaaccgaaacctatgccacatccagagccaaagcctgaacctcaaccatagcccaacgctga

SEQ ID NO: 17432 - DNA, 407 bp, Zea mays
  Clone ID: LIB84-006-Q1-E1-H2
ccggcgctgaaaaaaccataccaccaaacaagtgccagcgccctctcacagtcgccgcaatggggagcaacttcatcatgatcaagcctgaccgggtccaaaggggcctcattggtgagatcatcagcccttttgagaaaaaaggcttctacctcaaggccctgaagcttgtcaacgtggagaggtcgtttgccgagaagcactaaaccgatctcgcctccaaacccttcttccaaggccacgttgactacatcatctctggccctgtggtggccatggtctgggatggcaagaacgtcttcacaactggccccaagatcattggcgccactaaacccctggcttctgagcccggcaccatccgtggcgactttgctgtcgacattggcacgaatttcattcatgga

SEQ ID NO: 17433 - DNA, 288 bp, Zea mays
  Clone ID: LIB84-006-Q1-E1-H3
agcaagcgcgtgcgacaggcttcaccttcaccaagcctgcacctggccagctgggtcgacgggctggcggcgcgcgtcgtttgcctcgcgtcgccgagctgcgggcaggcccgaccggttgggactccacggggctgtcgggtactggtccgtcgagcgggagccgtagccgggacaggacctgtccgcgccaaccttcttcccgcggggcccggcatgacaccgagccctacgggacgcctggcgcaacatccgtgcccgccgaagcaactgcctgggccaaaggag

SEQ ID NO: 17434 - DNA, 215 bp, Zea mays
  Clone ID: LIB84-006-Q1-E1-H6
cgggtccacccacacgtccgatcggaacgttctgagagcgcaactgaaaagattatgagcagcatcatggataccattgctgacaaccttcctaagcagaagtctgggaaatttgatccaggttcagtctctgacaaagtgaagaataaactgtttggtcgtcagaagaccttgcatggagttctgggtggtgggaaaactgctgatgtgctgtt

SEQ ID NO: 17435 - DNA, 393 bp, Zea mays
  Clone ID: LIB84-006-Q1-E1-H9
accacgcgtccgacgaagtgcgagcgacccacgtccacacgacacgaaccaccaccaccaaccagcagccgcaccacgcacccagcgcaaagcgatggcgtcgctcaccatgatggcgtccttcgccgccgtggcggtggccgcgccctcgcgccgcggcaccttcgccgtggtcaggtccgccaaggtcgaccgctgccaggagcccgccacgctagcagcagccgaggccaggcccgccgccgacggacgccgcgccgtcatgctcgcggctgctgcggcggccgtggcagccatcggcggcgccggcgccgccatggcgggccccaggaacgggacccccgaggcgaataagaagtacgcggccatctgcgtcagcatgcgcaccgccaa

SEQ ID NO: 17436 - DNA, 338 bp, Zea mays
  Clone ID: LIB84-007-Q1-E1-A10
gggtcgacacatgcgtctagaccgtgtcatgttcttgaaggaacatttggaagaaatccactcgtatacagcatcccattctggttgcagcagctctaaggagttatggggcttatcttgctgatgggtctgagtacagtggggattatggtgaagctggtacgacagagttcctgaaggactttcatcggcggtggcttcaggttcttgctgaagcaggcccggatttgattgcttttgaaacgatccccagcagattggaagctcaggcatatgttgaactccttgaggaatgtaacattaatatcccttcatggctttccttcagctcaaaagat

SEQ ID NO: 17437 - DNA, 461 bp, Zea mays
  Clone ID: LIB84-007-Q1-E1-A11
cccacgcgtccgctctagtcctctcgcatccgcagcttccccagccagctagggtttgcagatgacgaccgcggcgcgccccacctgggcgccggccaagggcggcaacgagcaggggggcacccgcatcttcggcccctcccagaagttctcctcccgcgacctcgccgcgcacacctccctcaagccaagaaaagacggtcaacagacccaagaggagttacagaagaggaatctcagggaggaacttgaggaacgtgagcgcaagcactactcttccaaggataagtcctatgccgaagaaagagaccggcggaaaagctctagccatctactcttagaaggttcaaagagagagacagaggataagatagttccacgagaaatcgatgctgatgactccgaagtggagcctaaaagcgatgacgagaacgatgaagatgatgatgacgacgacactg

SEQ ID NO: 17438 - DNA, 488 bp, Zea mays
  Clone ID: LIB84-007-Q1-E1-A12
cccacgcgtccgggcgaccgctacgctactgagctcctccttcgccatgcccgccgccgcccgtagggcctcctccccttcctccgcctcattgagcttcgccacgtcgcagctcgccggcctctccctctccgccggcgttgcaactccaaccgccgtcgccctcctccccaagaggcagcagctccagcccactgtcgcgcggcgtgtgtgcccgttcacggacaagaagacgaaccgggcgaacaaggtgtcgttttccaaccacaagacgaagaagcagcagttcgtgaacctgcagtacaagaagctgtggtgggaggccggcaagcgcttcgtcaagctgcgcctttccaccaaggccctcaagaccatcgagaagcacgggctcgaagccgttgcgcgcaaaggcggcatcgacctcaacaagaagtgagcaagaagtgagcccatccgaagagcaaccaaactaatgttgggggggaact

SEQ ID NO: 17439 - DNA, 233 bp, Zea mays
  Clone ID: LIB84-007-Q1-E1-A9
gcatacgtcagaacagacatcagcacaaccatggatgcacccagacgcgccgccgccacctgcaacgctcagcacggtgtgcaccacgagaagctcagcgccgtcgcactgcaactgcaggcgtgtagccacaccatcgccggcgattgcgggtcctcgctcacaagcgaaacctacgtgggtccgcgcggctgagccgacgtggcgttctcgcgagcagcggccatgttcct

SEQ ID NO: 17440 - DNA, 329 bp, Zea mays
  Clone ID: LIB84-007-Q1-E1-B10
cacgctacggctaatgcggccggtgccggcgcccctcccccagtgccgacgccgtggccggagcagttccacgcggtggtcttcaccaatctcaccgatagcggcggccggctgcagctgatcgacctgtactacgactggcccaggggccgcaacctcaacctcatccgggaccagctctccagcgacccgctctacgacgtcgagtggaccaacggcacctcctacttcttcgactccgggtcctgccgcaccatgcgtttccccgtggggatcctgccgcctgactggctcgccgccggcgccgtctatctcggtcgcgagcacgt

SEQ ID NO: 17441 - DNA, 476 bp, Zea mays
  Clone ID: LIB84-007-Q1-E1-B11
gatatgtgcaagggagtgcagtatctcaatgaaatcaaggattctgttgtggctggtttccagtgggcatcgaaggagggtgcactggctgaagagaacatgcgcgggatttgcttcgaggtctgtgatgtcgttcttcatgctgatgctatccacaggggtggtggccaggtcattccaactgccaggagggtcatttatgcttctcagctcacagccaagccaaggctgctggaaccagtttacctggtggagatccaggccccagaaaatgcactgggtggcatatacggtgttctgaaccagaagagaggacatgtattcgaggagatgcaaaggcctggtaccccgctctacaacatcaaggctttcctccctgtcatcgagtcctttgggttctcaagccagctgagggctgcaacctctggtcaggcgtcccccagtgtgtttttaccactgggacatgatgggctcgg

SEQ ID NO: 17442 - DNA, 365 bp, Zea mays
  Clone ID: LIB84-007-Q1-E1-B12
aaatgctgcagtgcagggtgttcgcctacgccgacacgcagcgctacaggctgggaccaaactacctgatgctgcccgtcaacgcgccgcgctgcgcgcaccacagcaaccacgacgacggcgccatgaacttcatgcaccgcgacgaggaggtggactactacgcgtccaggcacgcgccgctgcggcaagcggcgccgcccacgccactgccgcccaggccggtcgcggggaggagggagaaggcaaccatacgcatgcccaacgacttcaagcagccaggggagaggtaccgctcctgggacgccgaccgacaggaccgattcgtgaggcgattcgccgactcgctcggacacccaaaggtc

SEQ ID NO: 17443 - DNA, 325 bp, Zea mays
  Clone ID: LIB84-007-Q1-E1-B9
cccacgcgtccgcgtacgtacgtagatcgatccatcgatcgctagctagctgacgaccatggcgtccctctcctctgccgccatcaccgccccttccttcacggccgcgcccgctcgcgcagtggtcagcaggaggtccttcaccgtgcgtgcctctctccgcaaggccactgccaccgccgccgtggccgttgccgccagcgtcctgcttgccggcggcggcgccatgggccaggaggtgctgctgggcgcaggcgacggcgggctcgtcttcgagcccagccagttcacggtcaaggccggcgacaccatcagcttcaagaac

SEQ ID NO: 17444 - DNA, 314 bp, Zea mays
  Clone ID: LIB84-007-Q1-E1-C11
agaacatggccgcctccgcctccaccgtctccggcctcgccggcgcctccctggccagccgcccggcgttctccaccagcttcacgcggggcagccgggtgtcggccaggaaccccctgatgagcaggaacctggagaggaatggcaggatcacctgcatgacgtttccccgggactggctgccgagggacctgagcgtcatcggcgtcgggctcatcggctggatggggccgtccagcgtcgcggccatcagcggcaacagcctcacggggctcgtcttctccagcatcggccaagagctgggccacttcccc

SEQ ID NO: 17445 - DNA, 422 bp, Zea mays
  unsure (1)..(422): unsure at all n locations; Clone ID: LIB84-007-Q1-E1-C9
acgattagttaacatggtggttaaccgtattatgaaagacggaaaaaaatcattggcttatcaaattctctatcgagccgtgaaaaagattcaacaaaagacagaaacaaatccactattggttttacgtcaagcaatacgtagagtaactcccaatataggagtaaaaacaagacgtaataaaaaaggatcgacgcggaaagttccgattgaaataggatctaaacaaggaagagcacttgccattcgttggttattagaagcatcccaaaagcgtccgggtcgaaatatggctttcaaattaagttccgaattagtagatgctgccaaagggagtgggggtgccatacgcaaaaaggaagcgactcatagaatggcagaggcaaatanagctcttgcacattttcggtaaaccatgaaca

SEQ ID NO: 17446 - DNA, 458 bp, Zea mays
  Clone ID: LIB84-007-Q1-E1-D11
gaggtggtggcggcggtggcggccacgtgggggcccatgaccgacggcgcgcgcgtcgagacggcgcccaggctcgcccaatggcgcgtcgacccgctcccctgctacacctaccgcaagtcactccccttcctcatcggcctctggaactggtgcatatctgtggagagaaataacaggcagacctgtgttaagctctttgcagagaatacaagttctctcaagaacggttcctcagccccaatagcttcctttatcgccaaacttattgtatctcttccacctaatcagcagaccatagtccacccaggaatttttgacaaacagctgaaataccacggttttgtgtggacaatcgatagcaccgtcactgggaggtttgtgaatgagatagaatttcgtgacctgaaggtcgctgattcgtctggccgcgaaccgggctccaattgggcctcccg

SEQ ID NO: 17447 - DNA, 513 bp, Zea mays
  Clone ID: LIB84-007-Q1-E1-D12
caatcacaggccgcctgtggattcacgcagcatccaaggttcctgaccccgacactatcaaagccatggaggattctacagggagatttatgccgtcgatggcatcactggcatcaagttccctgatcattaccctgtctcacgcctccttggctgtgttgaggtggtaggctgcctcaggtctgaagagcttgtttgctgggaacatgtgcctgagtctgtcaggcttgaagggctgactgacttttgttggctctgtgaaaatccacagaagttggtggttccattcgagatgcgtggttaccagggtgtctacaatttagaaagaaggatctatgatggggctgtgaggggccttttacctgttcaaggtccactgcctgtcaagttccctcttccagatcccagagaccccttctccttgaagccaagatctcttacatttgctgcttccaaaaccactctgcaaaaatctggaagtgttgctgcagcaataaccggggctcgagctgc

SEQ ID NO: 17448 - DNA, 416 bp, Zea mays
  Clone ID: LIB84-007-Q1-E1-D9
aagaaatggctgcaatacctgcagcgatcccgggctgctgctcttcgtctcgcctgcctcaacttgctggcctccctgcctccacaagcagaaggcgcttcaaggtcacagccatggcgcccaaaaagaaggtgaaccgctacgacgagagctggtctaagcagtggttcggcgcgggcatcttcgcggagggcagcgaggaggtgtccgtggacgtgttcaagaagctggagcggcgcaaggtgctgagcaccgtggagaaggccggcctgctgtccaaggccgatgagctgggcctgacgctctcctcgctggagaaactgggcctgctctccaaggccgaggacctgggcctgctcagcctcgtcgagaccgcggcggggacgtccccgtccgtcctcgcctccatctcgctg

SEQ ID NO: 17449 - DNA, 352 bp, Zea mays
  Clone ID: LIB84-007-Q1-E1-E10
cagacgcgtgggcggacgcgtgggttcttacccaatggaggagcagcattcacgattccggcagtggcaatggcagtggcgcctcttctccctcctctcatcccagccggagctgctcccgccgccgcggccggccaaccatgtcaggtgggaggagaccgccgccgcgcagctcttctccgcaagcctcgcgggagtgctcaaggaggacatcagggtggcggtggaagacgccaggtacctcgtcatccgcaccgagctggacgccggcaccggcaccggtggtgccgtcgcggacgcgaggagcttcgagcggaagtttcggctgccggggatggtggacgtggagcgg

SEQ ID NO: 17450 - DNA, 439 bp, Zea mays
  Clone ID: LIB84-007-Q1-E1-E11
cacacgcgtccggcagcagctgacttacgggtaggaattaactatattcctaaagagttccttttggatccaaggtatgctgctccagaacaatatattatgagcacacaaaccccgtctgctccttctgttccagttgcaacaactttgtctccagtcctgtggcagctgaatcttcctgacagattcgacatatatagcttgggcctcatattcttacagatggcattcccgtcactacgaactgatagcaacctcatacaatttaatcgccaactgaaaagatgtgattatgacttacaagcttggaggaatctggtggagccacgaacgagtgctgaagctcctgaagggctttgacatcatggatttaaacggtggtatcggatgggaaatcctcacctcgatggtccggtacaaagcacggcagaggaccaat

SEQ ID NO: 17451 - DNA, 441 bp, Zea mays
  Clone ID: LIB84-007-Q1-E1-E12
ggtcgacacatgcgtcagcacacgcgtctgctgaactcctgaagcaaaagcaatggccatgagagcgcttccgctgaccccttccatgagctcctcgtttggagctcagcaaaccaggccgagcggtggcggccccagatcagtgagagcttatgcgaagggagactaggagggcgacaagcagtccctgttcggaagcatcaccgaggcgctggacttctcgcatgtccggtcggaaaaagacgccgagctgctgtactaggccagggattccaccagacgtggagggaggatgacgagggagcagtacggtgcacttaggcgggagattggtggcacctaccatgatttcgtcatgtcatatgttgaagtcaacgggcaatacgtggaagagggttgggtccacagaacctgcagtatctgcaagaaggacacaagggg

SEQ ID NO: 17452 - DNA, 408 bp, Zea mays
  Clone ID: LIB84-007-Q1-E1-F11
tctcacgcatccatacatgcgtctgcatactcgagagcggacgcccgttcgaacgctgacgtggatgtcctatacgacgaaatggaacttttccatactctttccaggaatactgtcttcaaccactgtactgtcagtactcgcagctgacgataatgccatgctaccacactgcgaattcctttgctcgttgctttcaatatggatcgtgtgaccaccaacgctgggaccttccacatcatgacctccatagacagctctgttaccgagatcatgccgagtcaccaacagaagtcaccctgctcaaggcggacgacaccaccgccaacgcccacgtggagcagctgcacgcgaagttgctcaaggccacgacctcgcagtcggccctcatcgagatcatccagttgt

SEQ ID NO: 17453 - DNA, 366 bp, Zea mays
  Clone ID: LIB84-007-Q1-E1-F12
cattcacctgaactcctgaagcaaaagcaatggccatgagagcgcttccgctgaccccttccaggagctcctcgtttggagctcaccaaaccaggccgagcggtggtgggcccagatcagtgagagcttatgcgaagggagacgaggagggcgacaagcagtccctgttcggaagcatcaccgatgcgctggacttctcgcaggtccggtcggagaaggacgccgagctgctgtacgaggccagggagtccaccagatgtggagggaggatgacgagggagcagtacggagcacttaagcggcagattggtggcacctaccaggatttcttcaactcagatgttgaagtcgacgggcagtacgtgg

SEQ ID NO: 17454 - DNA, 438 bp, Zea mays
  Clone ID: LIB84-007-Q1-E1-G10
cgcgtgactcgactttaccccgctgctccgcgtccctctctcgtgctcgccgccccacagctcgaagccgacgaggtggcctcagcacacgcgcgcgcagccatgggagcattatcagcgaagaccatacagaatgcattcttggcacaacacagacggagataggcatggtgcaagatatcccagtgatttttgttctctcaatacccgcagcatgcattccgtccaggaatgtagattggcagtggctgattcttcagccaagtggttaaataccacatcgacactatggacgagcttcaacagacaagcatacattagctgcaatgctgctcaagggggcactgttgtgtgttcatctgagacagttgagtttccgaagcttcagaatgggagtgagattcgtggggttggtgttgccggggtttaaggtgagcc

SEQ ID NO: 17455 - DNA, 375 bp, Zea mays
  Clone ID: LIB84-007-Q1-E1-G11
cacacgcgtccgcccacgcgtccgctcaacccccgcccccgtcgcggatcgtcatggccgccggcctcgccttccccgtcgcctcctttccactcgcctgcgtctcctcacctccccaccccgggcaccgcatctgctgcgcgatcccgtcgtcgtcctcgcgccgcaccgtcaaatcctcgccgctccgcgcgactaccgtcctctccatggaacgacggggcacgggccgtggcgcgtccgtagtgtgccgctgtccagggccaggacacgaccatccaggtctcagatgatgccaaagtcaacatggggagtcactcgtgatggagagcgagcttcctgtccctggttgagttctcggtggggatgggtgcg

SEQ ID NO: 17456 - DNA, 301 bp, Zea mays
  Clone ID: LIB84-007-Q1-E1-H11
cggacgcgtgggcggacgcgtggggttctagatcgcgggcggccgccctttttttttttttttaatttgtctgtgactatgtatttgctgtttctcccagtaaatagatattacagttcttttcagttctgagacacctagatttaaacacatacactgcacaccggaccttttctcgtccttattgctccactatgattcctgtcctttctttcactaaccaaaactctcttttcctttatctttctctcatatgagcacttcacaaaaataagtatatggatgcagctagtagtaaatt

SEQ ID NO: 17457 - DNA, 396 bp, Zea mays
  Clone ID: LIB84-007-Q1-E1-H9
agctcaccgcggtttggctttctcccctcttccgcaccgcttctcgctccggattccggattccctctgctcgttccctaacgaaggtagccatggcggggagaggtaaggcgatcggctcaggcgccgccaagaaggccacgtccaggagctccaaggctggcctccagttccccgtgggaaggatcgccaggttcctcaaggccggcaggtatgccgagagagtcggcgccggggcccctgtcgatctcactgccgtgctcgagtatcttgctgctgaggttcttgaactggccgggaatgccggacgtgacaaccagaagacccgcatcgtatcgcgccacatccagctcgccgtccgcaagcgacgaataagctctcgcgccttgctggggc

SEQ ID NO: 17458 - DNA, 406 bp, Zea mays
  Clone ID: LIB84-008-Q1-E1-A11
ctgcgcctcgacatttcttctcgctctgctcctccgcctccgcctgatccatccaagacagggatcgccatgtcggactccgaggagcaccacttcgaatcgaaggccgacgctggggcatccaatgacctacccgcagcaagctggaatcgtccgtaagaacggcttcatcgtcatcaagaaccgtccctgcaaagttgtggaggtttctacctccaagactggtaagcatggccacgccagatgccactttgtcgccatagacatattcaatgggaaaaagcttgaagatattgttccttcatcacacaactgtgacattccgcatgtgaaccgtactgagtatcagctgattgatatttctgaggatggatttgtgagcctccttacttcagatgggaacact

SEQ ID NO: 17459 - DNA, 406 bp, Zea mays
  Clone ID: LIB84-008-Q1-E1-A12
gtccttcacattgctgctatgaggagggaacctaaaatcattgtctctcttttgaccaagggagctcggccatcagacctcacatttgatgacagaaaagcagtgcagatctccaaacgacttacaaagcatggggattactttgggcctactgaggacggaaagccttctcctaaagatagattatgtattgaggtactagagcaagctgaaagaagggacccgcaacttggagaagcatcggtttctcttgcgatagaaggagactctgcgcgtgggaggctactctaccttgaaaaccgagttgctttagcaagaatactgtttcctatggaggcaagggtagcaatggacattgctcaagtcgatggaacactggaattcacccttgtttctagtgtgaatc

SEQ ID NO: 17460 - DNA, 333 bp, Zea mays
  Clone ID: LIB84-008-Q1-E1-A2
gggtcgagccaacgtccgggaagaagcgatcgctgtcacgtcttctctactccttgcctccggctccatgacgtggccagcaacattgcgtccttccctctcgccccagcatcagcgtctggttaatttctgccgcgctgcaagaactaggccgctggacagcaagaggggtagctggaggcgctcttccagtgccaccggcggctcgtcgaccgccgtctcgtcgtcgtcagaaagatgggttctcgaccctgcaggagacggtgactggcgccacatcggctacaagatcgcgcgcactggggcgatcgagatagtctcggtggacaccgc

SEQ ID NO: 17461 - DNA, 371 bp, Zea mays
  unsure (1)..(371): unsure at all n locations; Clone ID: LIB84-008-Q1-E1-A3
acgcgtccggctaagctctacagctcgagtattgcttgctcaccagaagaaacaatgcagtgcaccaacaatggccgccgcctcctcgtcctcggtcctcctgctgctcctggccgccgccttggctggcatgagcgccattttggctaacttcatcatcagcaacaactgccggttcaccgtgtggctcgccgccactccggtgggcgggggcacacacctcaggatgggcgggacgtggaccttcaacgtgccggctgggaccatctccggccgcatgtggggccgcaccggctgctccgtcaacggcaagagcgggagctgccatacaggcgactgcngcagctcgctggactgcacgctgtcggggc

SEQ ID NO: 17462 - DNA, 415 bp, Zea mays
  unsure (1)..(415): unsure at all n locations; Clone ID: LIB84-008-Q1-E1-A5
acgcatactgcatacacaacacagagcatcagaaggagctgcgatctgatcgacatggctgccgccaccatggctatcacctcccgcgcgctcatcggcaagccggcggctggcacgagggacgtcttcggcgagggccgcatcaccatgcgcaagaccgccgccaagcccaagccggcggcgtccggcagcccctggtacggtgccgaccgcgtcctgtacctgggcccgctgtccggctcgcccccgagctacctgaccggcgagttccccggcgactacgggtgggacaccgcggggctgtcggcggacccggagaccttcgccaagaaccgcgagctggaggtgatccactgccgctgggccatgctcggcgcgctcgggtgcgtgttcncggagctgctcgcccgcaacg

SEQ ID NO: 17463 - DNA, 398 bp, Zea mays
  Clone ID: LIB84-008-Q1-E1-A6
acgccgccgttttcccccatcgtctcggcgactcctgagtcccgacctctacgctacagcggctgtggtgatccgtcctccactcctccttcgtccattcctctggtgcaaggtttgtccagctctggcctctggttcttctgctttgaaacgtcagtctctgcctcttcgtctctggtctggtgtgccgcgccgtcctgttcggcagcctcagctacggcgccatcccggtcgaatctcatcgcagctgatccctctggatcacgtccgcggcaacggcgccatcccggccgaatctcgtcagcgtaactggtccctttggatctcgtctgcgcacggcacagctgctcagtctcatgatttaaagcgcagctggtccctctggatatttacttttg

SEQ ID NO: 17464 - DNA, 90 bp, Zea mays
  Clone ID: LIB84-008-Q1-E1-A7
aaataatgttgttctgaataccaatatactgtgtatttgatcatcttttgacattgaaatgttgttgctgttgtaaaagcagctttgagg

SEQ ID NO: 17465 - DNA, 421 bp, Zea mays
  Clone ID: LIB84-008-Q1-E1-A8
ctaattttggtttgagttttgtttgaattatttcaagtaaattctttttacccttttctggttaatttatttcaaagcacacattcttagtttagttttttttgtttctgacagatctctttcgatacacgttttaactacaatgcctatgtgaatatgcacccgtttcctattccgtttctagaattttcgcaggccgagaatgacttgcagccttggattgctagagacgacgaacaaggccagacgatgtggagagtcaaccaacgtatagtgaagcttatagcggagctcatgacgaaccatgacagccctgaagccttggtgatactcgctagtgcctctgaacttctacttcgtgctactgatggaatgcttgttgacggtgaagcttgtactttgccacagcttgagcttctcg

SEQ ID NO: 17466 - DNA, 361 bp, Zea mays
  Clone ID: LIB84-008-Q1-E1-A9
ggaagctcatgttaaagataaggtacttactgatctgaaagccataatctgtgctcatgacgcatcatattctgaagatattgaaggatgcatccgtaattcactcttgtggctgcttcatgaattacaaattcatccatgcacttacaagtgccgtcaagatgctgttgcagatttgctccagttgtatgcatatatatagtgctttttccgagtcagggattaccatacagtaacatctccatcagttcatatcactccgcttgacttacgccccacatatgcctaatatactgtgaacattcgtttcatgagtactgcatgacatactcataaaattactgcttagcccatcatatct

SEQ ID NO: 17467 - DNA, 386 bp, Zea mays
  Clone ID: LIB84-008-Q1-E1-B1
ctgacacacctcagaagcaagttcggttcttaacactgtcaggtgataaaaagctgttgactccgcaacctcggctaaggacaggatttttctcagttatggactctcaaatgatacctgttgggtgcatccctgaagcatgcacttctgttggtgcagctaaatatgggaggccaattggtttagatgagagccttaaggtggatttgattgtgattgggtcagtggcagttgatccaagttcaggagcacggttagggaagggagagggatttgcagagcttgaatatggaatgcttcgctatatgggagctatagatgattcaaccatgatagtaactactggttgccatgggctgagccagcccacaggtgatgacagcagc

SEQ ID NO: 17468 - DNA, 408 bp, Zea mays
  Clone ID: LIB84-008-Q1-E1-B10
cccacgcgtccgccgccgtctagctgacatggctgacactcagttcattgcgaccacattccggccagagattgctaaagtggctgataagatatatgccgtgagacacaagaatagggtgagcaacatcgacgtggtgtccaaggaggaggccctggacatcatcgagcgtgatcagacgtacaatgctagctgacgctgctgctgctgtgtattgattgatctgcaggcagatgctaacgcagacaggatagttcttgttgtgttatggatattctggcctattgttgtagctgtgtatatgtgtgatgcagttacgtaactattggaccagcttgtttggcgcatcaacgttgtgaatgtatcagctaccaccttggcttggtaccagctttaattacatttggg

SEQ ID NO: 17469 - DNA, 393 bp, Zea mays
  Clone ID: LIB84-008-Q1-E1-B11
gagaggagtgggagacccgcgagaggctgccgtgtagggaccgtagactcagcgactgcgaaggagggataaggggatggccgggatcggaccgatcaggcaggactgggagccggtcgttgtgcggaagaaggcacccaccgccgccgccaagaaggatgagaaggccgtcaacgccgcgcgccgcgccggtgcggagatcgataccatgaagaagtacaacgctggtacgaacaaggcggcatccagcggtacatccctcaacaccaagcgcctcgacgacgacaccgaaaacctcgcccatgagcgagttccaagtgatctgaagaagaatctcatgcaagcaaggctcgataagaagctgacacaggcacaacttgctcagatgataaa

SEQ ID NO: 17470 - DNA, 397 bp, Zea mays
  Clone ID: LIB84-008-Q1-E1-B12
ctgacgcatactgcgacacttattgcaggacactgtagacaacatgataaccatccctttataatgcaaacagatatatgttgcagtaattgtgttctcgactaaatcttcaaacataccctgccttcatgactatggttaagccatgaccatttccatctgtgattcttgaattatctacactgatccatttcggtaaggttaaggtaagaactgttcgttggatagaatggattcgaaaaaagcgtacttttcttaatgattattctgagttctttcttttgttaatctagtcgaacaactatgagacttttagaactactcaaatgcgagcaatcttatcattgcgataccgtaaattgtctagatagttaaatgttattgtcacagcaaaata

SEQ ID NO: 17471 - DNA, 362 bp, Zea mays
  Clone ID: LIB84-008-Q1-E1-B2
cttcggtatgcacttgtgttgtgttgtgttgcacggccagagcagcaactgggtggtcgtccagttcaggcatcctaacccctcgaacgatcacagggtcggcgtcttctctccctcgggtttcaggtactcgacggactatggcatgtttaggctctgcatatcgaacacggaggatgactggaggccgggaacggaacagtacaagttcatcgatcgaatcagccctggctcatcttcctcgcgcaccgtgttctcggctactcgtcgggtggctggtacgagacaatgatgggctcctacggggagccgataggccgggacgggcttcaagacctctggcagatgtacgatatagcggt

SEQ ID NO: 17472 - DNA, 389 bp, Zea mays
  Clone ID: LIB84-008-Q1-E1-B3
cccacgcgtccgggccgttagccaggaatcccggcaacaatgacttccctttcctccgccgtggcactgccgtcctcgtgccgggcccggccggcggggggaagccggagggcgcggatggtggtgacgcgcgcggcggcgtcgagcccgaagctgccgaacgggcggcggctgcgggtggcggtggtgggaggcggccccgccggtggcgccgcggcggaggcgctggccaatggcggcgtggatacagtgctgatcgagcggaagatggacaactgcaagccctgcggcggcgctatcccgctgtgcatggtgtcggagttcgacctgccgctcgacctcgtggaccgcaaggtgaggaagatgaagatgatttcgccgtccaacgt

SEQ ID NO: 17473 - DNA, 425 bp, Zea mays
  Clone ID: LIB84-008-Q1-E1-B4
cccacgcgtccggcggcgcgatggcggtgggcgacctggcgttcaaggcgctgacggctgggctgggcgtcgccacgctctacctcgccgccaccttctccgtcaacgtctaccgcggcctctcgtggcactccgagcagtccaagctagaaaaggcgaaaaccgaagattgaaaaagaccagcaagcagttttagagagcagatgaaaggcgggcatttttgttgatgtcttatctttcgtgtcaattgtgtttttgcttgtcccgtagacctttcaggatatctggagtgtatcttcaagtatgtgatatatatatacgattcaagaacctgtctgggatgattattcatctttcgggacacgtcctggttggatcattatataacaacatcgcaaatgtcctgggtatgtaacattttttac

SEQ ID NO: 17474 - DNA, 408 bp, Zea mays
  Clone ID: LIB84-008-Q1-E1-B5
ccgtggtcaccaacaacctcactctatctgcgcagaagagctccgattccctcttcaacatcgtgcccgggctcgatgggaaccctaactcggtctccctcgagctcgggaccaaaccaggatgcttcttggcgacgggcacgaactactccgcagggacgaggattgaagtcaactgcaagagttcccttgagagcattggcgggatactcgagcatgcggcgagcttttcgcaaactgacccattgaggcagtatcacccgatcagctttgtcgcgaagggggtggccaggaacttcctccttgagccattgtacagtttgagggacgaattctacacggtttacttcaacgtcagggtctgagtcctgacgcttacacttgcagtagaagtaatacagaataaat

SEQ ID NO: 17475 - DNA, 421 bp, Zea mays
  Clone ID: LIB84-008-Q1-E1-B6
ccaggtccggcggcgaagcgagatggtgtcatccaagaaagtgtgcgtggtccgcgctggcgtgtcggggctggcgtgtgcccgcgagctgctccgctagggctacgacgtgacggtcatggagcatagcggcggcgtcggcgggcagtggctgtacgacccgagggcggacggcggcgacgcactctgcgctgccggctcgcacagcagcatgtacgccgccgtccggctcatcatcccgatggagctcacgggcgtctccgacttcgccttcgtccccagagacgacggcaccggcgactcccggcggtacccggggcacgctgagttcctgaagtacatcagggacttctgcgacgcgttcgggctcatggacgtcgtcaggctcaacaccaacgtcctgctcgtcggcctgtcggcg

SEQ ID NO: 17476 - DNA, 407 bp, Zea mays
  Clone ID: LIB84-008-Q1-E1-B7
gccaaagcttgcaatggtgtgagggattcatgtgtattgcaagccaaagctcctctcccactgccaccaagttggcactgtccagagctgtgtgcgctgtcttcctgtgtttgtgatgaccacagccaccaagttcaccacaccatagccagaacattctagggagttgctggcctgtatgaagcttgttccgtaatcatctcagagctcccagcagaaggagtgtaaattaaagatgaagtggtcgtggaagaggagtttgctccagtgcatgttcatcaagtggatggagctatctaactggttattgggtagaagatctagaacctcttcattgcaataaggtgatgagaagtactcgatctgttcgtgaggctggagagcgtttccagttctggacgacgact

SEQ ID NO: 17477 - DNA, 412 bp, Zea mays
  Clone ID: LIB84-008-Q1-E1-B8
gcaggaggccctactcttgccttgaatgagtgccagattttggtacagcagaaaccccagggagattcacgactgctggcctctaatctgtgcaggaagaagcgacctcgcagatcacgagatgggcctacgtcagtggcagctgtcatccagcggtgggctgagcgcaacaagcatttggagtatgaggaatctgaggaggcaaagcgaccaagaaaagcacctgcaaagggttcaaagaagggctgtatgaagggaaaaggggggcctgacaatactcaatgtggataccgtggagtgaggcagcgtacttgggggaagtgggttgctgaaataagagagccaaatcgtgtcgacagactctggctgggtaccttcccaaccgcggaggatgcagctagggcctatgatg

SEQ ID NO: 17478 - DNA, 407 bp, Zea mays
  Clone ID: LIB84-008-Q1-E1-B9
gtccaggaaatgtcaatgcagtcgacgagcaacctgaccatcagatgggcgttgagagggaagcctaagaacccgttgttcgcgagcgtcggaggagacgtcatcgtccgcgtcgagtcacggttcgtcctgaaccagataagcgggcaggtgctggagcaggccgagtcctgggacctctccgcctcgtccctccctgcccaggcctacttctggctgtcccgaagggtctactccgccgtggagtccgggaaggacgcgatcgaagccgccaagagcgcggcgtcgtctgggctgacgaccaagggagaccagaatctcgaggcctatccggatccttctgctgatcctacaaagcgttgttttgggttgcagttctttcagaggccggatgatgggttcagcca

SEQ ID NO: 17479 - DNA, 408 bp, Zea mays
  Clone ID: LIB84-008-Q1-E1-C1
cccacgcgtccggcggtggcttcctcgctttcttctgcttccagaagaaggcgtgactttcgctctatggacagagataaaaaaaatgtcggaggttgacgatggacaagattaccgggttatcaaatttttttagtgataagcaattttttggcacaaatttaaagaaataactcagtttgtctagaatataattgtatctagacatttaagaaatgaaaacaacacatgagtcagccaaacgaggaatggaggaaagaaattagtgtaaagcaactccaataattatctaaaaagagcatgctaaaatcatatttaataagttgctaaatagctacgggagtaaaaaataagaaaaattctctgttgagggtaatgcttcgtagccgaagatcctagaaagaacac

SEQ ID NO: 17480 - DNA, 408 bp, Zea mays
  Clone ID: LIB84-008-Q1-E1-C10
cggacgcgtgggcggacgcgtgggttaggcaaagcatcctcctgtttggatcggcatggagaagacgacgacgacggcgcagccggtctgcgcggaggagtcgctggcgctgctcaactgcgtcgcctcggtcccctacgaccgggatatgtgcctcgccctcgtcgacgccctccgtgaatgcatcgtgcgcaagagggtgaagaagttttcgctggcagaaccaagctccaccacaaccaccgaagctctgaagagcgatacgaagccctgagcattctgcaaagaaaactctcttatgtttcggaaactgtatcatctgattgggcgcggttgatgataactctatgcctgttaatgtagcgttagatttgtacttttgaacccatgccagaaatcaccaatctg

SEQ ID NO: 17481 - DNA, 410 bp, Zea mays
  Clone ID: LIB84-008-Q1-E1-C11
acaccaccgcgaaaccccagcagccgcatcgatggcgcctaaggcggagaagaagccggctgcgaagaagccagcggaggaggagcccgctgccgcgaaagccccggcggggaagaagcccaaggccgagaagcgcctcccggcggccaagtcgtccggcaaagaaggcggcgacaagaagggtaagaagaaggcgaagaagtcggtggagacctacaagatctacatcttcaaggtgctgaagcaggtccacccggacatcggcatctcttccaaggccatgtccatcatgaactccttcatcaacgacatcttcgagaagctcgccggcgaggctgccaagcttgcgcgctacaacaagaagcgcaccatcacctctcgggagattcaacctctgtccccttgtcctg

SEQ ID NO: 17482 - DNA, 410 bp, Zea mays
  Clone ID: LIB84-008-Q1-E1-C12
cacaccaccatccacgcactagtacgtagtaagcgagcttagctactgatcgtcgtcaagcactcgagctcgatctctcgaagcggctagctgctagctgctagcagccaattaatggcgaagccttcgcaggtgctggtgtcggcgctcgccgcctgggcggtggtcctgctgctgctgtgcgccgccgcgccgcggggcgccgacgcagccacggcgtgcgacgccgcgcagctgaccccgtgcgcgggcgccatcatcgggagctcgccgcccaccgcggcgtgctgcagcatgctcagggagcagcagccgtgcctgtgcacgtacgcgcgcgaccccaagctgcagcgctacgtcagctcgcccaatggcaagaacgccatggccgcgtgcaatgtgcccgtgcc

SEQ ID NO: 17483 - DNA, 427 bp, Zea mays
  Clone ID: LIB84-008-Q1-E1-C2
cggacgcgtgggccttatataccttcggaaggtgaaggttggttaagcttttatgaacttctggaggccattgtcgatcagccaccaccttctgcacctgcagatcagttctctccagaattctgctcatttatctcctcttgcatacagaaagatccggctcagaggatgtctgcttcagaactcttgaatcacccttttttgaagaagttcgaggataaggacttaaacctggggattcttgtggagaacctggaacctccaatgaatatacccgaatagcctgtcgtttttagtgatgaagcctttgttgtgccttcagggtttggcctcgaagcctcttggcatctgctcctcaactgcagcctcgctacctgaatatgctataacatcattgtatgattcaagccccttatctgagcataag

SEQ ID NO: 17484 - DNA, 421 bp, Zea mays
  Clone ID: LIB84-008-Q1-E1-C3
cggtccaggactcgcgggtcgaggcccgcgtccgcgtccacaagatcccgagcggctgtccgtacgtgctagtacgactaggtgggttaccgccctcgcggcgcttgtgcctccgccatcatactacacgtgcgaagccttcatcgctaccagaatacgggacaattaccaccccgtccgcactctacgatggcggcgcctcgggccacggctcacgcggcctcgcggtgtctctccggtgccaagtcgtacgaggctgctgagcggatctccagcccggttgccatctcggagccttcaactggcctccgggaaaataggagccgcgtcctcagcgttcgtgccaatgttgccacaggcgttcagacagccagcactgtggctgatggagcgaaaatgccgtggtagcacaatgatgctc

SEQ ID NO: 17485 - DNA, 266 bp, Zea mays
  Clone ID: LIB84-008-Q1-E1-C4
gatatttatttagtttgactcttgagttaggcatgaatttaaccccaagctagctagagaagttttttttcccctttgaaattcttctttgctcgcctcttcctcctggatcaaattgcgttggaggagaagaaacggcagctttctctctttcgttttctttgcctgcttcaccgctacgataatggtgaaaatatgtaagctacgtggacatcaatgatccacagcatcgttgatatatataatatatagagaaaattctctgc

SEQ ID NO: 17486 - DNA, 409 bp, Zea mays
  Clone ID: LIB84-008-Q1-E1-C5
gttgcccagactcggagggagttggtgcctctgtgtctctgtgtgtgtggagatggaccccaagttccccccacccccaccgctaaacaaaacggagcccaccaccgcgacgaccaccaccacctcgaccgcgcagcagcagcagcagcagctggatcctaaggactaccagcagcagcagcagcagccggcgcagcacctgcaaatccatatccaccagtcgtagcaggacggaggcggcggagggaaggagcagcagcagctgcaggtggtggcgcagcccggggagaggaggcagcaggcgctcgcgcccaagcggagctccaacaaggaccgacacaccaaggtcgacggcatgggccggcggatccggatgcccgcgctctgcgccgcgcggatcttccagctc

SEQ ID NO: 17487 - DNA, 393 bp, Zea mays
  Clone ID: LIB84-008-Q1-E1-C6
ctgtcctggcatgtgccaatcctaccgaatcacgttacaacccaaggctttctgtaattgacaacattcacttagccccaactctactttcaagattcgacctaatttatcttatcttggacaaggcggatgagcaaactgataggcgcctggcatagcatattgtttcgttgcattttgagaatccaaatttagaggagctcgaggtgttggatctgcagacactagtttcctacataagctatgcaaggaagtatattcagccacagttaactgatgaagttgcagaggagttaactcgtggctatgttgagatgaggaaaagagggaatagccctgggagcagaaagaaggtcataactgcatctgctagacaaatatagagtttgattc

SEQ ID NO: 17488 - DNA, 398 bp, Zea mays
  Clone ID: LIB84-008-Q1-E1-C7
cagtaatcagagtaatctctctgtgcctgcgacgacgactaggtgggttaccgccgtcgcgccgccgccgccgccgccgtcatactacaggtgcgaggccttcatcggtatcttaacaggcgacgaacaccaaccagtctgcactctacgatggcggcgcctccggccacggctcccgcggcctcccggtgtctctccggtgccaagtcgtgctgggctgctgagcggagctccagctcgtttgccgtctcggcgccttctactggcctccggcaaagtaggagccgcgtcctcagcgttcgtgccaaggttgccactggcgtgcagagagccagcactgtggatgatggagcgaaaaggccgtggaagctcagtgatgctcgtcttgtcctggaaga

SEQ ID NO: 17489 - DNA, 418 bp, Zea mays
  unsure (1)..(418): unsure at all n locations; Clone ID: LIB84-008-Q1-E1-C8
cgacatcttctcgcgcctgcttaaggagcgcatcgtctgcatccacgggcccatcgccgacgacacggcctcgctcgtcgtcgcgcagctgctcttcctcgagtccgagaacccgctcaagcccgtccacctctacatcaactcccccgggggcgtcgtcaccgcggggctcgccatctacgacaccatgcagtacatccgctgccccgtcaccaccctctgcatcggccaggcggcctccatgggctcgctcctcctcgcggctggggcgccgggtgagaggcgcgcgcttcccaacgccagggtcatgatccaccagccctcgggcggcgcgcaggggcaagctnccgacatcgccatccaggccaaggaaatcctcaaaatgcgcgaccgcctcaacaggatctaccagaagcac

SEQ ID NO: 17490 - DNA, 412 bp, Zea mays
  Clone ID: LIB84-008-Q1-E1-C9
gcgcgccgcggcagcagagggggagagagagaggcagagcgagcgagcgagagagcgctggtcatggcgtcactgtctgtcgccgccgtggcggccaccatagcgatgccaagcagcagcggtgggagagggcgccgtctcagggtcgcgtccatggccacccagaagggccagaagccgacgcccaagaccgtctccggcacgagaagatcgggcacgacgacggtgttcccggtgggcgagccgggcccgcggccggcgacgacgagcggcaaagcgccggttaagctgctgacgaacgtggagaagctgcggctgctgaccaaggcggagcgcgcgggcctgctgtcggcggcggagcgcgcggggctgtcgctgtcggcgatggagcggctgggcctactgtccaagc

SEQ ID NO: 17491 - DNA, 407 bp, Zea mays
  Clone ID: LIB84-008-Q1-E1-D1
atctactgcaacatttatatggcattcattcttagctacggagtacaagaattgctgtctttaaacaagcatctgcccgtagggagggaaaaaaaaactaatctgtcagccaagctgcccaatcgacatttgaggcaaggctacaacaaataaataaagaaccccacggctaagcatatcaattgtcaataaagctatgcagggaaaggagaaattggcgtgcaccacgtggtattgccacaatgtattatcaggatgcaacagctgtgtgctgcaccatgtcatgctgatatattgtatctgttatcctagatggtggccagtatcggagcacagatctcccgaggatgttcttaactggaaatggaccccagttatgttaatcaaagctgttgtttctgttatcc

SEQ ID NO: 17492 - DNA, 408 bp, Zea mays
  Clone ID: LIB84-008-Q1-E1-D10
ccaaggccgatgccaagctggcggtgaagagcaagggggcggagaagcccgccaagggcaggaaagggaaggccggcaaggaccccaacaagcctaagagggctcccagcgctttcttcgtgttcatggaggaatttcgcaaggagttcaaggagaagaaccctaagaacaagtctgtcgctgcggtggggaaagctgctggcgacaggtggaaatccctgagcgagtcggacaaggctccctatgtagccaaggctaacaagctcaagctcgagtacaacaaggccatcgctgcctacaacaatggcgagagcactgcagctaagaaggctcctgccaaggatgaagaggatgaatatgaagacgagtctgacaagtccaagtctgaggtcaatgacgaggatgatg

SEQ ID NO: 17493 - DNA, 407 bp, Zea mays
  Clone ID: LIB84-008-Q1-E1-D11
attcttcctggaatccaccaaagccctgcctcccctctactgattctgaaagtggagttccatctgcgcgtcggttgatttattctatttgctgagttggactacattacctccatgtcgagactgcgagctctgtggcaggcttcctttaacgccacaaagagagctcttgtatggagttcagatgatctaattccgccaagtgagagatgtatcttcaatttcaactcaaaagatgagctgaaaacgtggcatttgtactcagattcagagtatggaggtttgtcttctgcatccttaaaaataactgatggcgcttcagttggagatactccattaactggtgtgttttctggtaacctttctttggatatgtctgaagagtcaacatggaggatcaggcgcta

SEQ ID NO: 17494 - DNA, 370 bp, Zea mays
  Clone ID: LIB84-008-Q1-E1-D12
aactgaagcatcaaattcacataatggtatgtcgagctcaagcagcaattaatggcagtacatgtacatatgaagctagcgctagctggctcaccaagcgcccaaattaactaatcaacccgtaaaaccccccatgcatgcactgcattgctgacgcagatgcaggcccccttaatctacccccatttcattaatcctatcagtaatcatgctactgctaatgacacaatcagagtagggtaccagtactatgtacagagaccaagagaaagtaacctaggatgggggaggggggattaattaattaacaaggaagccctaatcccctggcggtctggacggataataatctagtcagacccgaggtcag

SEQ ID NO: 17495 - DNA, 334 bp, Zea mays
  Clone ID: LIB84-008-Q1-E1-D2
caaacgctgcgtaaacgaatccatcgccatggtgtctcgtctcgttgcggcagcggcctcctcctcctccctctcctcagcgtcgcccctcgctcgcctaatctctcgccgcggccttgccggtgccgcagacggccatgggtctgcgaaggtgcccttgtggaaagatccgttgagcccgagcaagtggaaggaagagcactttgttctagcaagcctctcaatgtggggggttattttttatggtggttacaagctttttagtgggaagaaggaagccaagactgaggcggcatcaccacaggcataggtggcggagatggagttatacccg

SEQ ID NO: 17496 - DNA, 426 bp, Zea mays
  Clone ID: LIB84-008-Q1-E1-D4
cgactcgcttctcgccctcagcgacgacctcgtcaagtccaatgttttcgtggagggcgtgtcacacaagatccggaggcagatcgaggacctcgagcgcgccggaggggtcgagagtgggaccctcaccgtcgatggcgttcctgtcgacacctacctcaccaggttcgtgtgggatgagggcaaataccccacaatgtctccgctcaaggagattgttggcagcatccagtcacaggttgccaagattgaggatgatatgaaggtgcgagcagcggaatataataatgtaaggagccagcttagtgcaatcaacagaaagcaaagtgggagcttagcggttcgtgatctttccaatctggtaaaaccggaggatatgatcacctcggaacatcttgtgacacttcttgcaatcgttcccaagta

SEQ ID NO: 17497 - DNA, 59 bp, Zea mays
  Clone ID: LIB84-008-Q1-E1-D5
ctcctccccactcccagggaacaacattcatcatcaatcgactataaactcttgggttt

SEQ ID NO: 17498 - DNA, 160 bp, Zea mays
  Clone ID: LIB84-008-Q1-E1-D6
cccatgcatccgcggacgcatgggctgacgcctgtgctacttcatagtaccgtgtactcctatcctattgtactaataataataatagtataatacgataggagtacacggtactatgaagtaccccacgcgtccgcccacgcgtcagcggacgcgtgcg

SEQ ID NO: 17499 - DNA, 427 bp, Zea mays
  unsure (1)..(427): unsure at all n locations; Clone ID: LIB84-008-Q1-E1-D7
ggcgagggacaccgtctctggccggatcgtcgctcttaaaaaggtccgcttcgataacctcgagccagaaagcgtcaagtttatggcccgggaaatactgatcctaaggagactcgaccaccccaacatcatcaaattagagggcttggtcacctccaggatgtcatgcagcctttaccttgtcttcgagtacatggagcatgatcttgctggtcttgcggcaagttgtgatgtcaagttcacgttgcctcagataaaatgttacatacagcagctgttgtcagggcttgagcattgtcatgacaataatgtattgcaccgggatatcaaggggtcaaacttgttgttggataataatgggattcttaagattgcggattttgggctggcaacattctttgatccacgacatanacgaccaatgacg

SEQ ID NO: 17500 - DNA, 419 bp, Zea mays
  unsure (1)..(419): unsure at all n locations; Clone ID: LIB84-008-Q1-E1-D8
cccacgcgtccgcccacgcgtccgcggcaaactccaagaacctgggccgcctgggcccagcacgttatcctcgtcaccagctcgctcgcgtgcccagcttcctgttttccctcttcctcccgcgctcggacatcgccagtgaaggcccgcgcgcgccgtcgtttgaatcctggttttctccctactcgctgcgctcacgtcgtcgtcttcctgctcgttccgcgacgtcgctcccagtccacagctcgttggcttccctgtgcgcggttgcggatgccgtcgcccgatccttgtgccttggcccgatccttgtgccttgccgagctcatcaccgccgcgagactctgcatcgctgtgctcagccacgcctcnctagtcgtcttgcacatactcatctccaaacaggaccacgctgccga

SEQ ID NO: 17501 - DNA, 407 bp, Zea mays
  Clone ID: LIB84-008-Q1-E1-E10
gtcagcggagattatattcagcgggaaagctcagcctggtgtgactgcatcggatgtcaatgtggaagaggtgaggatggtcgtcgacgaggatgtcggaggcttcggcttcaccagtgacaacgagctgatcaacggaaaagccgccataatcggcttcctcctgctgatcgatttcgagcttctaactggcaagggccttctcaaggggacggggttcttggacttcatctacgcagtttcgggagctttcaactgagagtcatatgtgtgtttgttgttcgttccttggtatcaagaatgccatcgaggtgtacttgactacccttagaagcctaggttttgtcagcgtgcgattcagtcagctgtgcttgtatttgaacatcaccatgcttgtctgtgaagtg

SEQ ID NO: 17502 - DNA, 396 bp, Zea mays
  Clone ID: LIB84-008-Q1-E1-E12
cggacgcgtgggccggcaacgagcacccaaagatggtggtccttcaaccagatcggttcctgagcgagctgacgagcatgtacgagcggagcacggagaagggctccgtctgggtcaccatgaagcgatcaactctcaagggcaaggcacagttgcggaagatggagaataaggggcaggaggtagagcacaggtgcctcgtccgcgcctccaatggcaagaagaacatctccacctcggtttctctaaaggagtacacaaagtttcaagcttcatacgcaacagttcttaaggcccatatgcatgctctgaagaaaagggagaggaaagacatgaagaagactgcagatgctgagaatgcaattgagaccgcacccaagaagcagaagaaagcat

SEQ ID NO: 17503 - DNA, 310 bp, Zea mays
  Clone ID: LIB84-008-Q1-E1-E2
ccctacatctgagtgcctcttaggtgccgacgcagcaagcatgttctgctgcggcagcattgagatcgcggcggccttcccctgcatccacgacgacgacctcgcggcagctgcggctgcgtccgcctcgtgccgccaccgcgggcgtgcggctgaccgtgtctgacgcggagctggagtcccgcgggttcgctgtgctgcgcacggcggagggcatcaacgtggcggcgtctcaacgaggtgttcctgcgcatgggcttcccgctgtcgtcaggaggagctgctgccgcgcgcgctggagcacatccgt

SEQ ID NO: 17504 - DNA, 430 bp, Zea mays
  Clone ID: LIB84-008-Q1-E1-E3
cccacgcgtccgcccacgcgtccggtctcctcgtttaaacgggcgaactcaagattgcaacagggtcgtccgccgccaccaattgctagcgcaatcctagccctagcccagcgccccctccggccctccctgcttcgtgcttggtagcgatggcgtcgttttctgaagcgcccccggggaacccaactgctggcgagaagatcttcaagaccaagtgcgcgcagtgccacaccgtcgacaagggcgccggccacaagcaaggtcctaatttgaatggtctgtttgggaggcagtctggtacaacacctggctactcttactcttcggctaacaagaacatggctgtgatttgggaggagaacactttgtatgactacttgcttaatcccaagaagtacattcctggaaccaagatggtattccctggact

SEQ ID NO: 17505 - DNA, 421 bp, Zea mays
  Clone ID: LIB84-008-Q1-E1-E4
ctcccgaagactcgctctcctgcgtccacgcctcgcttgcggcgactaaggcgactgccgccgccgcccttcgcccaggtgctcaggtcctcgtcgggcgctttaccggtgaatagcgcccaccataccagattggccatcagaagattgctacatttgggaatgatgatcacaggcgctgttccattgcggaacattgggaagagagcagacgatctcttgtacaatgactacaactttggccaaaacttttctttgactacatgttctaactctggtttgaatctcacagccattggtgtgaagatcattgaagacttcaatggtgatatacggacacagcagttgaagcggaagaaccactgttggtgtcataatcgatactgattctacagtgtcagacacagtcactgttgatgat

SEQ ID NO: 17506 - DNA, 424 bp, Zea mays
  Clone ID: LIB84-008-Q1-E1-E5
cccacgcgtccgcccacgcgtccggggcgtcgtcgccgagttttctccggccgagggcggcgcgaccggacaaccagcgtgagcgcgaccggcgacatgactcgcggcaaccagcgtgaccgcgaccgtgagcgcgcggcggcgcggaagcccaacgccaagaactcccaggacgggctcaccccggagcagcgccgcgagagggacaagaaagctctggaggagaaggcggccaagaaggcgcagcaggcagcggccggcggcaccggtacctccacggacaacaacaagaacaaggcaggtggcaagaagtaggaggcagtggcgcgccgccacctctgtacgattaatcgatgccttgagcttgtaacttgttcgcatccttgtaggtgcgatgcttgttgggtcactaactctgatgata

SEQ ID NO: 17507 - DNA, 384 bp, Zea mays
  Clone ID: LIB84-008-Q1-E1-E6
cggacgcgtgggtgccgacgcagcaagcatgttctgctgcggcagcattgagatcgcggcggccttcccctgcatccacgacgacgacctcccggcagctgcggctgcgtccgcctcgtgccgccaccgcgggcgtgcggctgacggtgtcggacgcggagctggagtcccgcgggttcgctgtgcggcgcacggcggagggcatcgacgtggcggcgctgaacgaggtgttcgtgcgcgtgggcttcccgcggcgtcaggaggagcggctgcggcgcgcgctggagcacagccgtgtggtgtggctgtcggccggggaagaggaagggcggcccgtggcgtacgcgcgcgcggccggggacggcgtgttcaacgccgtggtgt

SEQ ID NO: 17508 - DNA, 423 bp, Zea mays
  Clone ID: LIB84-008-Q1-E1-E7
ctctcgtgtctccactcgccctcgagctctccctctccgtctccagtcgccgtgagctagggtttggagctaggacgtcgtcggccgggccaggggcgccgccaggaccgcgctcgcggagtccctgcaggtcgccgagcacgccagcaagacctccttctccgccgggaggatgtcggtcaaggacagcaagccgaggcccctgtcgcgtagcctcgatgccgccgcgccaggacaggtcggtttcggttcgccgctgcaactcttcgtctgtctgtcttgttgctcctgggaatcttttttgtgtttgctcatgcggttcctgtgttcttgtttcacttgcaatattcccccatttgtggtttagattcagttctcgccgtgagaataatttggcgctcattcttttttcagtctctctct

SEQ ID NO: 17509 - DNA, 422 bp, Zea mays
  unsure (1)..(422): unsure at all n locations; Clone ID: LIB84-008-Q1-E1-E8
ggacggcaagcggcggaggcgctgtcatccgctggtcccttttctttccgcgcgcatggcgagagtcttggccgccgtctggccgatcgttaaaggctgcatcaccggcggcgtgttcggcatcaccatcgccgactggagcgcctcctacgtcaccttgcacggcgcctccatgcaccccaccttcgacccgcagcaggccgaatgcgctctggtagataagcgctgcctccaccgctaccacttctcccgcggcgacgtcgtcgtcttcaggtcgccgagggaccatcgtgaagtggtggtgaagaggctgattgcgctgcctgnggattggattcagatcccggagaaacaggagatccggcagatcccgcangggcgctgctgggttgaaggtgacaatgccgccaccagctttgact

SEQ ID NO: 17510 - DNA, 409 bp, Zea mays
  Clone ID: LIB84-008-Q1-E1-E9
cccacgcgtccgcatccggttcggttccgtcgtccactctcgttccccagttcgctggaccatctcaaaatcctatcctcctctccttccctccgtatctcatccggccgattcgaatctccggtcccatcctctacggcttcaccccgcgcccaatccagtctgtacgtgaatcttgacaggggagagaagaatcggataaggagacctgcaccttcctccgagcaaagcaggagaggaaacaagaatagaggaggagatggccatgcccaccttacgccttgctcctgacctgccgcccgtatcccgcctctgcttcgggacaatgacgatgggagagcagagcggggcggcgtgctcgctccgcctcctcgacgccgcctacgacgccggcgtcaacttcttcgac

SEQ ID NO: 17511 - DNA, 283 bp, Zea mays
  Clone ID: LIB84-008-Q1-E1-F1
cgatgacatgagctccttcgtaggcggggtcaactccggctcctaacccttcacggtctacatgcagcagcaggaggtccgacaaaaacagcattgcatgggcgcatactgagagagtcccgtggcaactgccgcgcatgaaaccaaggggtgtatcgagcaagtacaccaggttgttataccgtatactgcacaaaggatgggactattacaccggtgcggctttcgataccacgatgcaatgaacggtagttacaggtttgtacccatgccgcagacttgc

SEQ ID NO: 17512 - DNA, 387 bp, Zea mays
  Clone ID: LIB84-008-Q1-E1-F11
ggcacgtccggtccatatggaccaccccgttggtattttggacctccaactccatagccactgccaccgctgcaccgtggaccagctggtccacccattccacctccaagataaggaagccctcgcccttgctggggatatcggccactgccatagcgaccaccctgacctccactgttcagattgtagcctcccccctgattcccagccgtaggatagcggttacggcctcctggtcctcggggctttgtacagtcatggcctgacccagctgccacaggaagcacattgtgcataccctggtcatgcctgatttgatgatgtgcttgccctgcctgcaggatttgaggcaagcgagaatctagtggacgattatcaagtttttga

SEQ ID NO: 17513 - DNA, 407 bp, Zea mays
  Clone ID: LIB84-008-Q1-E1-F12
cctcttctctgccccaggccagaatcaagggagggtgaagcaccgccgccgtctccgctgccgcacaaagacgagaggaagaggttcccggcgcctccaccaccatgtcgtcgatgatgaacgcgctggcgaactggctggcgaacccgcgccgcaacccgctggcgcgcctccacatgcacgccgtctcctcgcgcctcaggaaatacggactgaggtacgacgacctctacgacccctacttcgatctggacatcaaggaggcgctcggtaggctgcctatggaggtggtcgacgcccgcatccagcgcctcaagcgtgccatggacctccccatgaagcaccagtacctcccggaggacctccaggcacagcaggttccattcagaggatatttgggtgacatg

SEQ ID NO: 17514 - DNA, 203 bp, Zea mays
  Clone ID: LIB84-008-Q1-E1-F2
cttcggtatgcacttgtgttgtgttgtgttgcagggccagagcagcaactgggtggtcgtcgagttcaggcatccgaacccctccaacgacgactgggtccgcgtcttctctccctccggtttcaaggaatccaacgaccaagggaagtttaaggtccgccataccaacaacggagaaggactgaaggccggaaacggaccat

SEQ ID NO: 17515 - DNA, 413 bp, Zea mays
  Clone ID: LIB84-008-Q1-E1-F3
cccacgcgtccgcccacgcgtccgcccacgcgtccggcagccgcgccgctcccggcgctggcggagcagatggagaaggccgcactgtttgacttcaacctgacgctcccggcgatcgcgaccgagttcctgctgctcatggtggcgctggacaagctctacttcacgccgctaggcaagttcatggatgagcgggacgccaagatccgcggtgagctcggcgatgtcaagggcgcctccgaggaggtgaagcagctggaggaccaggcggcggccatcatgaaggcggcgcgcgccgagatcgcggcggcgcttaacaagatgaagaaggagaccaccgcggagctggaggccaagctggacgagggacgcagccgtgtggaggccgagctcgtagaggcgctcgccaacct

SEQ ID NO: 17516 - DNA, 357 bp, Zea mays
  Clone ID: LIB84-008-Q1-E1-F4
cccacgcgtccgcggacgcgtgggtgccaatctcttgaatctagggaccaaatcaaaccaaggcggaattgggcgtaagcctcctgcgtggatctaaacaaatgagagcaagaaacttggagaaccatatgagatcagcaatggaaaagctggaatgtggatttgattttgttgaagtctggaaattggaaggtgacgagggcatgacaacactcaatgcaggagagaattccccaactaccaatggcgtgactgtgcttggggctcggcaagttcctgaagcgggtgcacttacagggcatcctgatcctatagattcactggttgataatgacttcgagacggttatagaaaacc

SEQ ID NO: 17517 - DNA, 69 bp, Zea mays
  Clone ID: LIB84-008-Q1-E1-F6
aaactgagtcgatacgtaggcatcgagcgtcagcatcacagacgtcacgcatcggcccatgagtaccag

SEQ ID NO: 17518 - DNA, 416 bp, Zea mays
  Clone ID: LIB84-008-Q1-E1-F7
cccacgcgttctggcaccggttggcgcgcacgttgcggtagtagctgaggtcgaaggtgtaggggctgcgcgggtccatctccaccatggtggtgtcgtcggcgagccccggctcgcacatctcccgcagctgcgccgcgtacgccttgttcagcgacgggtcctgccccacgtggccgctgtagttgtacagccggtccgacgcgaacgtggtgcactgcgccctcccgatcgtgtggcttcctgcactgcatgcagtcagggattgttccgtgtgtaccaccgtcgtcgatcgatcagtcgtctagctactttgcttgcaggacgtacgtacgtacgtagttggacagctcattggttgtattgtacctgacaacacgacgacgtccttccagcccaaccccttgaagctgaag

SEQ ID NO: 17519 - DNA, 404 bp, Zea mays
  Clone ID: LIB84-008-Q1-E1-F9
agcctaaagcctcctttatgttgccagtacaaaattggtcggtgtcgttctaatttgctcgtatagacgtacttaataagcaggtgtacgtaccttcatgaacctgtaagattgttcagatgtatataattctacttagtgcacacaggtagtggataataatggatagacgaggaagtttatgcattcggctttgtgctccaggagcctgtagtgtgtgaacatgatatgtatgaatgtattatatatctcaagtgtgtttatggagtaaaaaaaaaaagacacgacaataatcgaacatagaaaagaaagcgacattgagaagaccagaatacatgaacatacgtaaataaaagtacaaaaaaataaaaaggggggccccccaaaaggttccacgcttactt

SEQ ID NO: 17520 - DNA, 412 bp, Zea mays
  unsure (1)..(412): unsure at all n locations; Clone ID: LIB84-008-Q1-E1-G10
gttcgacgtgctgaacgacggggcccccgtggactcctacgtggtggacgacgccggcgtgctgagccgcgtcaccaagtccgacgtcaagcggcttgcccgcgacctcgaggcccgcaagaacatccgcctcaacttcatcaccgtccgcaagctcacgagcaaggctgacgcgttcgagtacgcggaccaagtcctggagaagtggtaccccacgattgaggagggcaacaacaagggcatcgtggtgctcgtcacaagccagaaggagggcgccgtcaccggggggcccgccttcatccaggccgtcggcgaccagattctcgacgccaccgtgtctgagaacctcncagtcctcgcgaccgacgagaagtacaacgaggcgatcttgagcacggcgaagcggctggcg

SEQ ID NO: 17521 - DNA, 431 bp, Zea mays
  Clone ID: LIB84-008-Q1-E1-G11
ctcgcgggtcgacacaagcctctacagtgactcgtaggaatatgaaactaatatatatgaaaacagatcctcccctaaaagaattgaaggccctgatggaagaaatcttcagctccagttcagaagtcagttggctcttccaatcttcactggtggaaaagttgaaggtgagcagggagcagctatacatgttgtgctgttggatgcaaacactggatgtgttgttacttcaggacccgagtcatttgcaaaattggatatccttgtgcttgagggtgactttagtaaagaggaagatgaggattggacagaagaagagtttgaaagtaatattgtcaaggagcgtgaagggaagaggcctcttttgacaggcgacctgcaagtgactcttaaagaatgtgttgggaccataagggagcttacattcactg

SEQ ID NO: 17522 - DNA, 407 bp, Zea mays
  unsure (1)..(407): unsure at all n locations; Clone ID: LIB84-008-Q1-E1-G12
gcctgcagtgacgagggtccggcaaggcacagcctcattgtgaggggtgtcatcccaatgctgagtgccgccactgccaaggcctttgacaacgaagccactgacgaagctattggttttgccattgaaaatgcgaagacgatggggctatgcaacaccgatcaatccgttgtggccctgcaccgcatcgggatttcatccgtcatcaagcttcttactgtgaagtangggtccaagggtgagggacaccattttgcttggtgaatttttgtgaggctgcttacgcacatcagcgtatccacagcttttctgttgccaaagatacagactttgcgttctggtacaccttggtgttacaaggttgtgggaatttgtcgtttagatattagcgatttaaacagtttatc

SEQ ID NO: 17523 - DNA, 393 bp, Zea mays
  Clone ID: LIB84-008-Q1-E1-G2
gttcgacgtgctgaacgacggggcccccgtggactcctacgtggtggacgacgccggcgtgctgagccgcgtcaccaagtccgacgtcaagcggcttgcccgcgacctcgaggcccgcaagaacatccgcctcaacttcatcaccgtccgcaagctcacgagcaaggctgacgcgttcgagtacgcggaccaagtcctggagaagtggtaccccacgattgaggagggcaacaacaagggcatcgtggtgctcgtcacaagccagaaggagggcgccgtcaccggggggcccgccttcatccaggccgtcggcgaccagattctcgacgccaccgtgtctgagaacctcccagtcctcgcgaccgacgagaagtacaacgaggcgatcttgag

SEQ ID NO: 17524 - DNA, 413 bp, Zea mays
  unsure (1)..(413): unsure at all n locations; Clone ID: LIB84-008-Q1-E1-G3
acaccaccgcgaaaccccagcagccgcatcgatggcgcctaaggcggagaagaagccggctgcgaagaagccagcggaggaggagcccgctgccgcgaaggccccggtggggaataagcccatggcctagaagcgcctctcggcggtcaagtcgtccggcaaagaaagcggcgacaagaagggtaagaagaacgtgaacaagtcggtggagacctacaagatctacatcttcgacgtgctgaagcacgtccacccggacatcggcatctcttccaaggccatgtccatcatgaactccttcatcatcgacatcttcgagaagctcgccggcgacgctgccaagcttgcgcgctacaacaagaagcccagcatcacctctcgggagattcanacctctgtccgccttgtccttc

SEQ ID NO: 17525 - DNA, 413 bp, Zea mays
  Clone ID: LIB84-008-Q1-E1-G4
cggacgcgtgggaaagaatggaggttattgtgcttatattgatgcagaaaatgccttcaacccttcatttgctgaatctattggcgtagacagtgaaaggctcttgatagcccaacctgattctgctgaaaattctctaagcattgtaaacactcttgttggtggttctgttgctgttgttgttgtggacagtgtggcagcacttattcccaaatgtgaaattgaaggtgaaatatacacaaattgtggagacatccaatcccatttgatgactcgggcccttagaaaaattcagtacactttatgtcgatctgaaacacttattatttttgtgaatcacgttagaacagagaggacatcaagtaatcctgggatctacaaagaggtgccttgcggtggtaatgcactaggat

SEQ ID NO: 17526 - DNA, 424 bp, Zea mays
  Clone ID: LIB84-008-Q1-E1-G5
cgcacttccgctacaccatggagatcaacgcgctggccagggaggcgctcatcaacgccgacggcatcatcgaggagtccttctggccgggcaagtacgccgtcgagcttagctccgtggcgtacggcgcgacgtggcagttcgacacggaggcgctgcccaacgacctcgtcaagcgcgggctggccgtgcgcggggaggacggggagctggagctcaccatcaaggactacccctacgcccacgacgggctcctggtctgggactccatcaagcagtgggcgtccgagtacgtcaacgtctactacaagtccgacgaggccgtggccgccgaccccgagctgagggcgttctgggacgaggtgcgcaacgtggggcacggcgacaagaaggacgagccgtggtggcccgtgctggacacccg

SEQ ID NO: 17527 - DNA, 279 bp, Zea mays
  Clone ID: LIB84-008-Q1-E1-G7
gcagctcatcagataggcaaacaccaagaagctaagctagcgcgccatgcagacgccgaccatgtcgacgtccatggccaccacggcgccagcgaagccccccgcgccgccgcggcaatgctgcaggtacctcctcctcccctccaccggccaccgccggagcgtggcggcatggtctgccaaaaagaagaacccgtggctggacccgttcgacgatgggcccgacgaggagttcgattaccagggcatgttctccggcgggaagcaggaggaagaccc

SEQ ID NO: 17528 - DNA, 361 bp, Zea mays
  Clone ID: LIB84-008-Q1-E1-G9
cccacgcgtccgcccacgcgttccgataaaaagaattctccacttccccactctccctctcccgctcgtggctcgtcagtgggtgggagtgtgcggggctagccgctagggtttccgcgagcccatcgccggccggccacggacgatccgggactccatccggcgcccgccctgaatcggcttcgcggggcgcaaggagcgagagaatgaagtcgtcgctgcggaagctgccgggcttcgcgctgcagcgccaggagcagcgggtggaccgggaccgcggccggggccacgccgccgccgccgccacggcggctgacgagctcctcgcggctgctcatgatatggcagatatgagaagctg

SEQ ID NO: 17529 - DNA, 187 bp, Zea mays
  Clone ID: LIB84-008-Q1-E1-H1
ctgggcgcacactgcatccgtactctgtgctagcagagcatccacaacttccggttcgggtcccgcgccgaacaatcgcgtcctgtgccgaagggccggggtgctcccggcactcagaagctcgcagacatctctgccgatgtccgcgtcatacatctaccgtagcgtattcgcgtagagcttcccg

SEQ ID NO: 17530 - DNA, 343 bp, Zea mays
  Clone ID: LIB84-008-Q1-E1-H10
gagctacctagcaacgcgcagtaagcagcgtgggcaaagctacgagcgcccggctagcttcgccatgaacatgggtggggtgtccccgtcgacagtccggtgcaagcactgcagcacgcagctcaccgtgtgccccggcgagcgcgccatccagtgcacgcaatgctgcggcgtgacgcgtatccggcggcggcgggtccagcggccggcggcggcgccgcccaccacaggcttcgcgcgcgcccgcggtaagaagcggggcctccggatcggcatcacgtacgcggggacgcgccggggctgcggccagctgaggggggccctcaaagaggttaaagtgcat

SEQ ID NO: 17531 - DNA, 378 bp, Zea mays
  Clone ID: LIB84-008-Q1-E1-H11
cggacgcgtgggcggacgcgtgggcggggccagtcgcggtccccaacgtcagaggatctcgttccagctgcggcagggcggccaacaccggcacctcatgggcgccgacgacgaatccgccgccgccatggaggtgcaagagagggaggcggagatcgagaatgccatgcgcgcccgcgtcgcagacttcaataagcaggcctactccttgactcttgaatgcgttaggacagcactggtaaaggacctggatttgaagatatattcacttgatgcacatagaaggtttataaagcactgtgtatacaaagtttttgctgaatctgctgatgaaaatgcaaatgatgatgcattagatgattctgatgctaaacatga

SEQ ID NO: 17532 - DNA, 436 bp, Zea mays
  Clone ID: LIB84-008-Q1-E1-H2
gggtcgaggcacgcgtccgcccacgcgtccgatttcatccacgctgctcgtgctcgctgcctgcttctcgcgcgatcgtctcgggctctcgggattctacagtggaggccggctctccgcctgttcttgtcgtcgctgctcctttcgcagtgagcttaaaatatacacaggatgtccgaacgttctgagagcgcaactgaaaagattatgagcagcatcatggataccattgctgacaaccttcctaagcagaagtctgggaaatttgatccaggttcagtctctgacaaagtgaagaataagctgtttggtcgtcagaagaccttgcatggagttctgggtggtggaaaacctgctgatgtgctgttatggaggaacaaaaagatatcatctagtgttctggctcttgcaatagctacttgggttttctttgagt

SEQ ID NO: 17533 - DNA, 406 bp, Zea mays
  Clone ID: LIB84-008-Q1-E1-H3
ggagtatggcctcggcacaggagaaatggaaagaggaatgatgcccaaagatacaactcggcgatttgaaaattgagttgccatttcacttactatcgccgattgcgattggaggtgcggcagctggaatagctagcactttggtgtgtcatcctcttgaggttcttaaggatcgcatgactgtcaaccgtgaggcttatcctagtattgccattgccttcagcaagatctaccgaactgatggcattggtggcctttatgctggcctctgcccaacgttggttggcatgcttccatatagcacatgctactatttcatgtacgagaccatcaagactaactactgccgtgcgcacaagatgaaatctttgagccgtcctgagctgctggttatcggcgctctttc

SEQ ID NO: 17534 - DNA, 424 bp, Zea mays
  Clone ID: LIB84-008-Q1-E1-H4
cccacgcgtccgagcaagagcaagcttcaacctttgcatgcagagacctagtggaatagagcgaggggaatggagcaaggagacgaggcgtcgtcggtgaccaaggagagcccggagcagcagcttacccgggaccgggagcagcagcacgacgccggcgtggcgtggctgaacctcacgcttcgcgcgggcgagtcgccctcgccggacgcggctgcgagctgctccgccgagtccgggtccgggtccgggtccgggtccgggcccgagcccaccgccaatccgtccgccgccccgcacaaggtgttctcctgcaacttctgcctgcgcaagttcttcagctcgcaggcgctgggcgggcaccagaacgcgcacaagcgggagcgcagcgccgccaagcgctcctaccacgcgcaccgcatga

SEQ ID NO: 17535 - DNA, 419 bp, Zea mays
  Clone ID: LIB84-008-Q1-E1-H5
agcggccagcaaactgcctccgtcctccctgcgggctgtgccgcctcttcttcgcgtcggcgccgccctccttccttctcttctgctgctgatggaactggatcctcgcctctacgagaacgtctctgtcagcgacaacgatgtccgaaacatagttctatcttatcttatgcacaactgttttaaagagacggcagaggcattcctatctagcaccgggttgaatttacctgtcgactatagtgtggatgtggataagcgtaaagcaatttttaattttgtgctagaagggaatgcccttaaagccatagagctgacagaagaaatggcacctaacttgctagagaatgatatggatctacattttgatcttcttagtctccacttcattgagctagttcgctccaagaaattcacag

SEQ ID NO: 17536 - DNA, 408 bp, Zea mays
  Clone ID: LIB84-008-Q1-E1-H6
cacattttgaagcgaatcctgcctgctggagtggaggtaccctcttcgtttgagacaattggtcatgttgctcatctgaacatatctgatgacttgctagcatataaagatgtcatagcaaaggttatctatgacaaaaattatccaaggattcagaccgtggtgaataaagtggggacaataacaaatgaatttagagtcacgaagtttgagatcttagcagggaaaaatgatatggttactgaaattaaacaatatggtgcaacattcagacttgattatggtttggtctactggaattcaagactcgagcatgagcatatcagattagtttccctgttcaagaaaggagatgttatatgtgacatgtttgctggtatacgtccattttcaatcacgtctgctcag

SEQ ID NO: 17537 - DNA, 427 bp, Zea mays
  Clone ID: LIB84-008-Q1-E1-H7
cggacgcgtgggtagctcttcttctcgaatccagcccgaggcctttttcttctgcggtttcatccgtacccatcctgcacacgaagcctagaatagccctcccctgctccgccacctcctcggatcccgaccaccccacccccaccccagacaacaggttgatggaggctaagatgggacgcttcttcgagtccgtgagcaatttcttcaccggaggcgaccacatcccctggtgcgaccgcgacctcatcgccggctgtgaaggagagcttgtcaatgctgcaaatgaggaacagaggaatgaaagccttatgaggttgtcatgggcccttgtgcactccaggcagacagacgatgtaaaccgtggaatcagcatgcttcaagcttctttggataattctgccagtcctctgcagactagggaaaa

SEQ ID NO: 17538 - DNA, 419 bp, Zea mays
  Clone ID: LIB84-008-Q1-E1-H8
gcgtgcgagataactcattggtgagagacataagccaaatgccgcaaagcagctatgggattgaaggattgtcacatataacagttgctggtgcgctcaatcatgggatgaaagaagtggaagtgtggcttcagacaataagtccaggtcaaaggacgccaatccacaggcattcctgtgaagaagttttcactgtcctcaaagggaagggtacgctcttgatgggatcaagctcactaaactacccacggcatccacaggaaattcctttctttcagaataccacattttcaatccctgtaaatgatccacaccaggtttggaattctgacgagcacgaagatttgcaagttcttgtgatcatatcgagaccgcctgctaagatatttttatatgatgattggagcatgcctcataca

SEQ ID NO: 17539 - DNA, 407 bp, Zea mays
  Clone ID: LIB84-008-Q1-E1-H9
ggagtatggcctcggcacaagagaaatggaaagaggaaggatgcccaaagatacaactcggcgatttgaaaattgagttgccatttcacttactatcgccgattgcgattggaggtgcggcagctggaatagctagcactttggtgtgtcatcctcttgaggttcttaaggatcgcatgactgtcaaccgtgaggcttatcctagtattgccattgccttcagcaagatctaccgaactgatggcattggtggcctttatgctggcctctgcccaacgttggttggcatgcttccatatagcacatgctactatttcatgtacgagaccatcaagactaactactgccgtgcgcacaaaaagaaatctttgagccgtcctgagctgctggttatcggggctctttca

SEQ ID NO: 17540 - DNA, 264 bp, Zea mays
  Clone ID: LIB84-009-Q1-E1-A12
cgcctcagcccaggcgtccggtatccctttgcctgccctgtagagcgacatggttcgctatgggcgatacagggagcatctccattctggtgcatattctggtggtcgccctatgcctgacctcctttggcttcgccgtcgccgcctatcgccgtccgcagcaggggttcaatatacacagacagctccaatgccacattttgtgtttacgactccgatattgctactgggtacggtgttggtgcctttcctgtttcttctctc

SEQ ID NO: 17541 - DNA, 391 bp, Zea mays
  Clone ID: LIB84-009-Q1-E1-A6
cccacgcgtccgcgtccatggggtaaacttccggaaaatgttccttgtcatccaaaacttgcagacttcgctaattgtatgaagaagaagggtcgtggtatgtccatttttgtctcgataattgatggtgattatcatgaactagctgaggatgcaaagactgcctgccgccaactagatgcttatattgactacaaacgctgtgagggtgttgcagagatcattgtagctcctaatatgtctgatggtttccgtaccattgtgcagacaatgggcctaggaaacttaaaaccaagtattgttgtgatgcggtaccctgagatctggcgacgtgagaatttgacacagatagcgtcaacatttgtcagcataatagatgagtgcattattg

SEQ ID NO: 17542 - DNA, 378 bp, Zea mays
  Clone ID: LIB84-009-Q1-E1-B6
ggcttgcggtggatacctaggcacctcgtcctcccgccacggctcccccatctccgtcaccgacgcccgcctcgacgtcctctgcgcgcgcatcgtcaagtactactccctccgccgattcgtcgccgagaccggccgcgcgcccgaggagtgggaccgcgcgcacgacgccgccatgttccattactcgtccgggatgcaagccatcatggtcgccgtgggagtgtgcgacagagtcagcgtgtttggcttcggcaagtcttccgacgccaagcatcattagcacagcagccagaaggcggagctagacctccacgactacgatgcggagtaggccttctaccacgacctctccgagcgaccgcaggtagtcccgtt

SEQ ID NO: 17543 - DNA, 316 bp, Zea mays
  Clone ID: LIB84-009-Q1-E1-B9
aggaggcaggccatgctggcgttcctggccttcctgatccagcacaacgtcaccggcaaggggcccttcgacaacctgctgcagcacctgtccgacccatggcacaacaccatcatccagaccctgtcgggttgagtcgacggtccatcacgtcatgtggtccgagctgaaaagccgagactcgaagacagttcgtgtgatgcgttcttaatcgactgatggctaaggaatgtgacgtactggtatatgtacattagttgaagcggaagctataaaaggtgtacagattgtttcatcagtgtatatcatctgtccc

SEQ ID NO: 17544 - DNA, 332 bp, Zea mays
  Clone ID: LIB84-009-Q1-E1-C9
catctgcaagagactacacacctccccaatatctcacactcctcctgaccgaccttggtgttctgacgccgtctgttgttagtgatgagctcatccaactgtatctatgatctttgcggcaggcgccgttgtttcattggcatgtaacatctacagttgagtccagggtttgccctatcagttttgactatgatgtatgcttgactttgtggtgctgatgcgatgtagaagaatttctcggaacgattatgctgagagaaatcaacagcttgtaagagcttaaagtacagtcatggttacgaatctgccccagaccattttcagcactaaaa

SEQ ID NO: 17545 - DNA, 423 bp, Zea mays
  Clone ID: LIB84-009-Q1-E1-D9
atgacaaccattatcacctgctgtctcaggagaaatattgactgacaacctcatgtcaaattttgatttccaagttatcaggtcttcttcagaaccaagctggtcggttgaaccacacttatcattgaagtaattaagcggttgtatttcattgttgatgtaatcaaaaattttagttccttcaaatataatagatgaatcattgctaaatctaacattgttgtcaatgttttcatagttccaagaacgaaaacatttatctgatgtcctgttaagtgtgtgcaaggtccttggatgactgcaaggtgtatcaaccaacaaggatgggtgagaaaaatgatttaaagtatccttgagggagggactatctatcaagtcactgttccatagagcatgaatataagggaaattcatctggtcaat

SEQ ID NO: 17546 - DNA, 406 bp, Zea mays
  Clone ID: LIB84-009-Q1-E1-E4
gagcaacggctttataggagtggacatagaggaggggggcttcaagcatcagcattgtcccaactgataagaatacgcccttttgtttgtttgctcaatacgtcggcttgagctgtttgtgtagtgcgcgagcagctaacctattcgaaacatttaccggactgtgaacacgcccacttcatccatgttggcaccatggtgtaaaatgagaacactcgtggctccaggtttattttatagtgtcttggaaggacgggctgattttgccctcacctggcttgtttcacatagagacaaccaagaaacgtgtgttcattgtttattgagatatggataccaaagcaatgctgaacttttagcatagttttttttaaaagaaagaaaagaaaaaaaggcgggcgctcta

SEQ ID NO: 17547 - DNA, 410 bp, Zea mays
  Clone ID: LIB84-009-Q1-E1-E6
gcggctgccgcgggccggcacgtcggcgtcggcgtcggcgtcgtcgtcgccgtggcgcgggcgcgaggaccacctccacggccacggcaagacggccaaggtgatgcacctgctgctctggggacccaagtgaagcggcgagaggccaccgtaccgccggcgttgctcgttttgctctgcctgcaatccgccccgcacggactgtactgtactgtacctatacacctatatactacgacgtgcacatgtacgagtctacgacgtgctgctgtaccatactaatactagtgcgctgctgctcccttgccttcttgcttgcaagttgcaccagccactccgcttttttttgctcgaacgatcgactgctcgtcgcgtcgggccacggccggtcgtcagtttgggtgtgtcca

SEQ ID NO: 17548 - DNA, 377 bp, Zea mays
  Clone ID: LIB84-009-Q1-E1-E9
cagacgcatgggttttttttttttcacggaagctgaataaccaatttattggatcaaaaagaaagtagatgttatcacaggatggctacataaaccttctgtgtgaagtaaactgtgagtacgaagtcaatccctggaaccagaaaatgcaaaagagatctacgtgcaagaagtagctctgccactactggacttcactaccacctttctctcacatcatccgatttgttctgttttccgtaaagtggtggttcgctatcagttcaagtcactggcaggccgtggctgtggatcatcaccttcacgaagagaatatcgaaagaatgttcttcttaacgatgaattcatcagctttggaaggactgattgacttctcc

SEQ ID NO: 17549 - DNA, 372 bp, Zea mays
  Clone ID: LIB84-009-Q1-E1-F10
acgcggaaccggcgagcgcctggcgcgtgccggctacgccgtctacggcctggactacgagggccacggccgctccgacgggctgcacggctacgtgccggatttcgacgcgctggtgctggactgcgacgagtacttcacctcagtggtggcggcggcggcgcagtcgcagtccaaggacgcccagcaacttccccggttcctgctccgggagtccatgggcggcgccctggctctcctcctccaccgccggcgccccgagtactggagcggcgccctgctggtggcgcccatgtgcaagatcgccgacgacatgcggcctcacccgctggtggtcaacatcctcagggccatgagcaccatcatcccgac

SEQ ID NO: 17550 - DNA, 390 bp, Zea mays
  Clone ID: LIB84-009-Q1-E1-F12
cagaattctcttcatttccaggggcaacagaacccacagcttcaagcttttatccagcagcataaactagcacaacttcagcaacggcagcagcagcatttgttgcaaccattttctcagatgcaacaaccccaagttggtattcctcggcagccgcaacttaggccgccattgggacagactggaatgcagttaggtggtcctgttaggactcctatcgagaggggcgtttgttctcgcaggatactgcagtatctatttcacaagcgtcatcgcccagagaataactctataacatactggaggaagattgttgaagagtactttgcacctcgagcaagagaaaggtggtgtgtctcttcgtatgaaaacagaaggaattcttcagct

SEQ ID NO: 17551 - DNA, 357 bp, Zea mays
  Clone ID: LIB84-009-Q1-E1-F9
tccagctaaagcccgtattcttgccgagcgcttgccctttccgttggaatacctctatgctgatcctgatcggaaggcgtataatctcttgggtctatattttggtgttggtcgcacgttcttcaatccggccagtgcgaaagtgttttcacggtttgactcccttaaggaggcggtgaagaattatacaatcgaagccaccccagatgacagggcatgtgtcctacaacaggggggaatgtttgtgttcaaaggtaaagagctgttgtacgcaaggaaagacgatggcacaggcgaccatgcacctttggatgacgtgctcaatgtctgctgcaaagttcctgtaacctaacccga

SEQ ID NO: 17552 - DNA, 405 bp, Zea mays
  Clone ID: LIB84-009-Q1-E1-G5
agaatgcttccctgtgtgcccaaagcattgataaagccagcaggtaatgatctagcacaagatggactacgcctgtggttagaagaacaccttaggcgtttacagagtggcatgatcaagacccgtatgctgatggcatcgagatatatcagcttatatccacacgcacctccatcatgcagttcagctgttacaaatggcattaaggtacgctcatctgctgtctttgtgccagaacatcctgagaggcctgcggaaaaatttatgttcacttactcaattcgcatgtcagttccataggcatgcatgcgatgtggcgtgtactattcgtcctgcgagctttgctcgcgccactggaccatcagatcgtgtgagagggttgtgtctgatgtgagcgggcgacgg

SEQ ID NO: 17553 - DNA, 380 bp, Zea mays
  Clone ID: LIB84-009-Q1-E1-G7
tgagaaatctgtgggttcctccttccagcttgtgtttgcaccaattgatgagcattttccggatgatgctccattgatttcctctggctttcgtgtcataccacttgatatgaaaacagatggtgtatcctctggtaggacgctagatttggcatctagtcttgatgtgggttctgctgcaccccaagcctcaggggatgcacctccagatgactgtaatttgagatctgtgctgacaatcgcctttcaattcccttatgagatgcaccttcaggacagtgttgctactatggcccgtcaatatgtgcgtagtgttgtttctgctgtgcaaagggtgtcgatggctatatctccctcccaatctggtctaaatgctgggc

SEQ ID NO: 17554 - DNA, 410 bp, Zea mays
  Clone ID: LIB84-009-Q1-E1-G9
cacacgcatccgggctcaaggaccctagagatagagatcgtatggtccaatacgccatccaacgactgtatgtagcgtacggatgatttacctgacgccaattcttgtactcttggcttccatgtaaatcagcccccccataatcatccgaattcatttatttgtacgtagaaagttaagacacttagataactcgcgccatcattcaattattgaggtcatttccgggattgtggccctgctgctgtaaactgattttgcacccgggtatttttttttttgtacaggtgaatttatttcatgtagttatagcttagtgtagattggtggtgagtacggactaaccctagtgacagtaacattgggtgtgaagtgtggcgtgatatttgctcccctgggtgtgttttccg

SEQ ID NO: 17555 - DNA, 412 bp, Zea mays
  Clone ID: LIB84-009-Q1-E1-H10
gcattgtacgcccatgtcccttcacttggtatgcccctgcactaggtgctagcgcggtacaattttcgacaatttgtggtgttgaactgaacctccatgacacaagctaaacctgcacctagtggcaagaggaactggagcagtggcgggactgccgctgggacggagaacaaggaaagacgagatgacaaagcaaaaggaatcacggttgctggttggaacaagggcgacaagaagaaagaagacaaagggcgacaagtaagtgcgggatcgaagaggccgtggagtgagggagtgccccgggttggtgtgaagagggctgtgtctgggtttgacaggaggaacaggaagatcgatgatgactcgttggatgatgaatgtggcaaggatgtttcatccttcaaattcaaag

SEQ ID NO: 17556 - DNA, 339 bp, Zea mays
  Clone ID: LIB84-010-Q1-E1-A10
accacgcgtccgcccacgcgtccgcccacgcgtccgctatccctttgcttgccctggagaggagagggtgcgctatgggcgatacagggagcagctccattctggtgcacattctggtggtcgccctatgcctgaccgcctttggcttcgccgtcgccgccgagcgccgccgcagcacgggttcaatagtcacagacagctccaatgccacattttgtgtttatgactccgatattgctactggctactgtgttggtgctttcctgtttcttctctcaaggcactcactgctcatgggtgttacaagatgcatgtgcttcggtgaacacttgcaccagg

SEQ ID NO: 17557 - DNA, 407 bp, Zea mays
  Clone ID: LIB84-010-Q1-E1-A11
agacgacttgtttcattgattcttgaagagatcgagcttcttttgcaccacaaggtcgaggatgtcttgcaactgcggatcaagctgcggctgcggctcaagctgcaagtgcggcaagaagtaccctgacctggaggagacgagcaccgccgcgcaggccaccgtcgtcctcggcgtggccccggagaagaaggccgcgcccgagttcgtcgaggccgcggcggagtccggcgaggccgcccacggctgcagctgcggtggcaactgcaagtgcgacccctgcaactgctgatcacatcgatcgacgaccatggatatgagtattatctatccagcttgtggtggtggttgaacaataataagccaggccgagctggctgccatacataggtactgtgtggtgtgtg

SEQ ID NO: 17558 - DNA, 389 bp, Zea mays
  Clone ID: LIB84-010-Q1-E1-A12
agcgcagcagctcccgcggctgctggcgacggcggcggcggcggtagcagccgcgccgctcccggcgctggcggagcagatggagaaggccgcactgtttgacttcaacctgacgctcccggcgatcgcgaccgagttcctgctgctcatggtggcgctggacaagctctacttcacgccgctaggcaagttcatggatgagcgggacgccaagatccgcggtgagctcggcgatgtcaagggcgcctccgaggaggtgaagcagctggaggaccaggcggcggccatcatgaaggcggcgcgcgccgagatcgcggcggcgcttaacaagatgaagaaggagaccaccgcggagctggaggccaagctggacgatggacgcagccgtg

SEQ ID NO: 17559 - DNA, 383 bp, Zea mays
  Clone ID: LIB84-010-Q1-E1-A6
aaattttgcgaagggaatggccgttgttgcagcaagagcaacgaggcttccaatttactcttctttcgccaaagaaggcaatcttagtgatttatttgctaaaggggaagccatatcaacacttttcaatgtcatgggaattggagctggaattggattggcatctactgtttgttcaacaactcaaggcaagttaattgcaggcccgttactttccgcagtgcatatatatggggtcatccaagatatgagagcaactcctgtgaacacactcaacccacaaagaacagcaatgatcgtgggtgattttatcaagagtggaaaggtttctagccccgccgagctaatgtacaaggaagacctcctgtttccaaccgagttat

SEQ ID NO: 17560 - DNA, 392 bp, Zea mays
  Clone ID: LIB84-010-Q1-E1-A8
aataaccctagcctcctccgccgccggcgacgaatccggcgttttgagtttctgttgccagcgtagccatgtccatgttcaataggatcttcgggaagcccaaagagcaggccaactccaatgccttggccactctggacaagttaaatgagactcttgatatgctggcgaagaaacaaaaggtgctggacaaaaaagcagccgctgagcttgagagagccaaggagttctcagaagctaagaataaaacgagcgggtatccaatccttgaagacgaaaaaactttatgagcaacaaattggacagcttggaaattttcagttgagaatccatgatcagatgatcatgttagaaacagctaaagctacaacagagactgttgatgcattgag

SEQ ID NO: 17561 - DNA, 407 bp, Zea mays
  Clone ID: LIB84-010-Q1-E1-A9
aaaaaaattaccaatttgacccttagccccggtgttatatttggttatttactaaaatccccttttgggggagaaggatggattgttagtgtggatgatttagaagatataattgggggacatgtatggttgggttccatttgtgtacttggcggaatttggcatatcttaaccaaaccctttgcatgggctcgccgtgcatttgtatggtctggcgaagcttacttgtcttatagtttaggtgctttatctgtttttggttttatcgcttgttgttttgtctggttcaatagtacggcttatccaagtgagttttacgggcccactggaccagaagcttctcaagctcaagcatttacttttctagttagacaccagcgtcttggagctaatgtagggtctgccca

SEQ ID NO: 17562 - DNA, 417 bp, Zea mays
  Clone ID: LIB84-010-Q1-E1-B10
aaggggcttcctcctgaggctgcagccgagcaaattgttaaagtacaacactagtacccttcccagcccatcttaacacaaggtctaaaatcctcagttgtactgttcctaactggtgtactgtttgcaggaagcagttgaatcaaaaggattgagagatgatacaacttgcattgtcattgacataataccaccagagaaacaaaaatgcgctatagaatctccaaaaacgccaggaaaaggccttgtccttctaaaaaatttcttcttaaggaaaacggcatctggttcattgtctctcgctgacaaggataattatcccgagccagatttcgtggaggaggtctttgaggatggatgcccatccctttcgaggaggtttgtgcccttatctcatcttgaatacggatgcataat

SEQ ID NO: 17563 - DNA, 336 bp, Zea mays
  Clone ID: LIB84-010-Q1-E1-B12
aaaaaacacccaaaaaaccaccttcttttcctgcgttcccctgctcgatccccgacgagaattcgctcccgaacccatcgatctgctctccgcagtccgccgatccgtggatcgatccgtgcgcgggctcggtccgccccgggttccgatctggtcgccgcctcgcctgaggagatgaacggcgccgggggcagccaccaccaccagcagcagaggctccggcagcagcagcagcaggcgctcctgatgcaccatgcgctgcagcagcagcagcagcagcagcagtaccagtccggcgtcctcgccgccgcggcggcgggggccatgacccaagtc

SEQ ID NO: 17564 - DNA, 414 bp, Zea mays
  Clone ID: LIB84-010-Q1-E1-B8
aacctacaggataggttctgtattacagggcaatccgactctactagtaccaataggcagcatacgggagaaaagcactacaccacgaaataggaatcaacaagagaaaaactttgttagaaattagccctttcctgattggtatcagggttgggaagaatggttgggataacaaagaaccatcaggtttgtactttggatacccttataaccatcaaaggtcgttgaaatggctaattcctctaaataggaggcgttgagaacaaagaaattcttggagctatcgttttcctctagcattaatataattcattggtgttaagaaaaacctcttgggggaaggttggcaagagatttcttggaaaaattacagcccccttcggtccataatgagatgggactaattcgattttt

SEQ ID NO: 17565 - DNA, 372 bp, Zea mays
  Clone ID: LIB84-010-Q1-E1-B9
atcgccatcacataaaaccagtgcaagcagaagcagcgcaatggcgagcagcaccatggccctctcctccacagccttcgccggcaaggcagtgaacgtgccgtcgtctctcttcggcgaggcccgcgtgacgatgcgcaagacggcggcgaaggcaaagccggcggcgagctccggcagcccgtggtacgggcccgaccgcgtgctctagctgggcccgctgtccggggcgcccccgagctacctgacgggcgagttcccgggcgactacggctgggaaaccgcggggctgtcggggggaccggggacgttcgccaagaaaccggagctggaggtcaaccagtcccgctgggccatgctggggccgttggg

SEQ ID NO: 17566 - DNA, 376 bp, Zea mays
  Clone ID: LIB84-010-Q1-E1-C10
atgaccaagcagagtgacgacgacgcgacaatcaagtccgtagctccggcggtagactttgatatggctttagctcgtctgtgcctcaacagggccatcgctggccgcgcgcaggcgctggcgaggccggcgctcgccgcagccccggcgacagatccgaaacttcactcgcttctctcaacctcggcagccgactctgccgcctcaggcgaggcaaaccgccgagatgtcgccgtgtcggagcgctccgcccccaatcgccgctgggcatggcgagacctccgcgacttcaccccgttcagcctcgtggacggtctcgggagcgcgctgtcgcaggtggcggagaccctgggccgcccgctggagcgcctggcgc

SEQ ID NO: 17567 - DNA, 381 bp, Zea mays
  Clone ID: LIB84-010-Q1-E1-C11
gctagcgcttatagcttgtcagccatggccaccgccgccgcgtctagcctcctcaagtcctccttcgcgggctcccggctcccggccgccacgcggaccacaccggcgtccctcgtggtggccaccggcccgcgcggcgccggcgcggggcccatctgcgcgtccatgtccatgtcctcctccaacccgccctacgacctgacgtccttccggttcagccccatcaaggagtccatcgtgtcccgcgagatgacccgtcgctacatgacggacatgatcacctacgccgacaccgacgtcgtcatcgtgggcgccggctccgcggggctgtcctgcgcgtacgagctctccaaggaccccgccgtgagcatcgccatcgtg

SEQ ID NO: 17568 - DNA, 407 bp, Zea mays
  Clone ID: LIB84-010-Q1-E1-C4
cccacgcgtccgctctgtaagactagactatcagaatttgatttggcaaatcgttcgttgtaccaactagctagacgctagttagtgccactagtgcagtgcgctctgacgtgacgatttcagttcacgtgcagaagtcgggttccgccggccatggccatccccggattcggcagctgcgcggacggccggactgcagccggcaggcggaagtgatgggcagcaccgtcgacgacgacgaggcgtgcgagctggtgagcggctcggacctcgtcatcggcgagggagacgacagcgtcagcgcgtaccttttcaaggccgtcaagaacaacaatggcaccggcatcctcctgctctccgacatcttcggcttccaggactccgccacgcgggacttcgcctaccgc

SEQ ID NO: 17569 - DNA, 64 bp, Zea mays
  Clone ID: LIB84-010-Q1-E1-C6
attacactagcgttcggcaggaagcaaacgcaaacgcgtgtcgacgtcagccggccacgccaca

SEQ ID NO: 17570 - DNA, 390 bp, Zea mays
  Clone ID: LIB84-010-Q1-E1-C7
acagacgcgtggggttctgactgcatgtatggttttatttcagaatcttaattgcactgtttataattttcttatgtgtgtagtttatttgatgcacaggaaatgcaagttaataatgaggcaccactagggtgcctcaagccaaatatttctcagtataactctccagagcagataggtggtgttgaagggtttcctgagaataatgaaaaaaggaatgatattgttgctgcggaaaaaatctgggaggcgactccaaaccaaggccttagcaggcccatctaccgacaagaattttatgcctggccatatatttattcagattatcaaatcgtgcgtcagccactaccttaaagttttgacaaccaattttatcataaatagggacca

SEQ ID NO: 17571 - DNA, 371 bp, Zea mays
  Clone ID: LIB84-010-Q1-E1-C8
aatctaacttttacttgtgtattgatttatgggtaagggtaatcgtcatatacatgatacatcacactacatatagatagttgggtactcagtactcgatcgtttacatctccagcacataagttgatgatacaaggattcagaaaatagaaatataaacatatatacacaaaagaaacataagctagatcaggcctaaatatcattctgcatgaacggaagcttgcaaggtcttccacaagtgcgtggtttcgaattacaagcagacagtacatctgctgctgggcattgcataatatgccggcctgtagcaagtgtgagcgtctctgcagggcttggggcagctgtattattagctccagcacgtcact

SEQ ID NO: 17572 - DNA, 415 bp, Zea mays
  Clone ID: LIB84-010-Q1-E1-C9
agttgattccaaaacctcttcttttgaagaaacaacatcagcaaaggcatcaaggtcaccagtacgctatgcttcagggcattgatgaatcagtgggagcagaattgggggaacatcatgaggacgcacatgaccacgaggagtttgagttcggtgaagtttttgttcaccaactgattcacacgatagaatttgttctgggtgcagtctcaaacaccgcttcataccttcgtctttgggctctgagtcttgcacactctgagttgtccactgtattctacgagaaagtactaatgacggcatatgggtttaacaatgttttcatccttattattggtgtcgtcatcttcatctttgccacgattggtgtcttgcttgttatggagaccctgagtgcattccttcacgcgctgag

SEQ ID NO: 17573 - DNA, 431 bp, Zea mays
  Clone ID: LIB84-010-Q1-E1-D10
ggcaacagcagctccggcggcgacctgttctccagcggcaagctggtggcgggggccgccgtgtcggtgttccagcagaagagcgtggagaacgtcgacaagcaggaggtcgccggcgcggcggccgagctcctgcacgcggcgtccgcgtacggtaagctcgacgacaagccggccgggcagtacgtcgagaaggccgaggggtacctgaaggagttcagcgcgggacacgccaccgagcaggagcagcctgcggcggcagcaggcgacgacgcggcgcccaagccaccggcgccggaggcgcccaaggagccggcggcggtgcctgcgccggccgcggaggaaggcagcaagtcgtcggagggcttcgggctcggcgacgtcatgaagggggccgagcaactggtgggaaggaagcagcaagggggggg

SEQ ID NO: 17574 - DNA, 195 bp, Zea mays
  Clone ID: LIB84-010-Q1-E1-D4
accacgcgtccgaaaacatttacagattcgtcatacccgtcaatagattggtctgtgttctctcgtggtgcctggatgctatgtagttcattggtactgctgccgtatgaatttcgatgattgctctggtgacttggtttgtaatctggagttggactatcgttgtttctgccgcataaatttcgatgattggtc

SEQ ID NO: 17575 - DNA, 362 bp, Zea mays
  Clone ID: LIB84-010-Q1-E1-D6
accacgcgtccgcccacgcgtccgaaggtccttgattacaagactcaacaaagcagactctttccgttgctggcttcagcatatgcatttagatttgtgggtgactggctgaagtggctatacatggatgtcactcagaaactggaagctaaagactactcaacactgcaagaagcccatgcctgtactgctggtttgaaggctgtgacaacatctgcaacagctgatgccattgaagaatgtagaaagctctgtggcggacatggttacctgaacagcagtgggcttcctgaattgtttgctgtctatgttcctgcttgcacttatgaacgagacaatattgttctgcttttgcaggttgc

SEQ ID NO: 17576 - DNA, 298 bp, Zea mays
  Clone ID: LIB84-010-Q1-E1-D9
accacacggattagatcaccgagaaggattggtgatgagcttctaagttctagaggcggggcgccacagggcactgctcgtgaagtgagcgaaatgggggcaactcgattcgcaagcgctgatcgtcgatattaccaccgcagttggactcatacgtgcgatcttaaatccgctaaggactcccttggataccatcactcatcgtgacaggctgcatcagtgtagtcacctgatccttcaattaacagcgcttcgagagagtaactccaaagggctgtcttatcagacatcagcactg

SEQ ID NO: 17577 - DNA, 359 bp, Zea mays
  Clone ID: LIB84-010-Q1-E1-E10
ggacagacatcatcgccaagattgtaggccggctcgggcttgataaaaccatgtttgaagcttccaactccaacacctcggagtggttcgtcagacgttatggcccaagggtaaatctctttgttgaacactctgacgtgatgaatctggagcgcctccggggcttcaacatgcgcagaagcaactcggcctcccgttttgcctcgccgttcttacacatctcaggaaggggaatgggcattagcccattagatcacgaagatacttctacatgttctcaccctcgcagagcttgttatggcctagagatgtaaccgcctttgttaatgcctccatgtagcccccagcgagcaacgcat

SEQ ID NO: 17578 - DNA, 404 bp, Zea mays
  Clone ID: LIB84-010-Q1-E1-E4
aggacacgtgggcaagtcgctcatacaggcgttcccgtcgcagtcgctgttcgcgggcggtggcaggggcatgaaggacccgcagacggtgttcgtcgcacgcgccacagggcacgccggggtccgcatcgcgcagaccctgctgcggcacgggtttgccgtgcgcgctggcgtcccggacctagcgtcggcgcaggagctagcgcggctggcggcggcataccggctcatctcccccgcggaagcgcggcggctaaacgccgtataggcgggcttctgtgaccccgacgcgataaccaagtccatcggccccgccgcgaaagtggtggtcaccgtccgctcggccgagaaagggccacaagggcgaggcgtcaccaccgacgacgcgctcccagtggtgcggg

SEQ ID NO: 17579 - DNA, 407 bp, Zea mays
  Clone ID: LIB84-010-Q1-E1-E6
aggacgcgtgggcggacgcgtgggcggacgcgtgggaaaagaaatttggggaagagattgatcaagatcttttgtatttaatatctgttgaccggatcttgcacatggaagatttcaatgaggatggcatgtgggtagttccatcagactacaccagtgcagaacctgatcctctacgcaattttgctgaaaacatcgtggaggaatttaacaacaaaaatgctgaagacgtccgtaggatatacaacatatatgtcgaatcagatttacaggtggcagacgtgaagatgatatgggttgacaggctaggtttcgatctccacgctcattctgcggaaggcgttttggctgttcgggtcccttttcctatggaggtctccgacgacaagggggtgaaatcctcgttc

SEQ ID NO: 17580 - DNA, 414 bp, Zea mays
  Clone ID: LIB84-010-Q1-E1-E7
atgacatccctgattggtgctttgtcgagatttatggaaaagaagggaaaaagtacttctcagagtctccttcagtagacgatctttgtcaattccaccagaagtcaccaatttcacatattgcaaaggtcaagacaccaacactctttcttcttggagcgcaagatctcagagttcctgtttctaatggcctgcagtatgcaagggctttgaaggagaggggaatcgaaacgaaaactattatcttcccagaagatatccatggaattgacaagcctcagtctgatttcgaaagcttcgtcaacataggggtttggttcaagaagcacatgggcaaataaacattagtgcttcccattacattcatgatttactttttcattgttactaaatgcctgtaactgggtcaaagta

SEQ ID NO: 17581 - DNA, 398 bp, Zea mays
  Clone ID: LIB84-010-Q1-E1-E9
agtcgctagtcgctcgctccatcaccgataaccaagatcccaagacctcctccagcctcctctgctctcgcgccggcacccgcacgcatggctgcctgtgtcgacaagtggcaccccacgcacgccggccgcctcaccggcgccatctaccgctacttgccggacggcgccacggaccgcgcggtggccgccgccgccgccgcgccggcgtccgcgagcggcggcgacgacgacgacgtctgggacgagctgcgcgcggaggcgcaggccgacgcggacgccgagcctctgctccgcaagtactacgccgacctcgtcctgtcgcgcccgtcgctggaggccgccctcgccgcgcacctgtcgggccaactctgcgtccccggcgcgctgccgcagga

SEQ ID NO: 17582 - DNA, 331 bp, Zea mays
  Clone ID: LIB84-010-Q1-E1-F10
accacgcgtccgcccacgcgtccggaaggggaacccgaacccgcggagctactacaagtgcaccacggcggggtgcccggtgcggaagcacgtggagcgcgcgtcccacgacacgcgcgccgtgatcaccacgtacgagggcaagcacaaccacgacgtgcccgtgggccgcggcgccgccagccgagctgctgctgctgcggcggcgggttccggggccttgatggccaccggcggcggccagctcggctatcagcagcagcagcagcagcagccatacaccctggagatgctgagcagcggatcgtacggcggcggccgcggcgggtac

SEQ ID NO: 17583 - DNA, 225 bp, Zea mays
  Clone ID: LIB84-010-Q1-E1-F4
tgccagttcccctacaacttcactgggtgccaagacctcgccaagcagaagaaagtccccttcatcagcgacgacctccagattgagtgccaagggaacggagaagttcaagtgcggcgccaacgttttctggaaatggtgaaacagctagcaacaccgtctgatgggaatggatgagatcatcacctgtcctgtcgaccccagatatgtccaaactgcagggaa

SEQ ID NO: 17584 - DNA, 329 bp, Zea mays
  Clone ID: LIB84-010-Q1-E1-F6
ataaaaaaaagttagacaaaccaatgaggccaaagaatgaagtttgaacattttgttttctttcttccctaattatacctagtagtgagtacaggagtcaggtctaccagaggtaatagtgaatagcagcaggcacagctgtcatgggcagggctaccatgagcacgcaatcaggcaggcaaagtgttgaagaaaggaaacaagaagcaggccacggacgagctggaccgccagaagcaggcggagaacaagccgcgccgacttgagaaaggcctggcaaactcggctgccataatctcgggggctggacaaggagaagcagcagaaga

SEQ ID NO: 17585 - DNA, 411 bp, Zea mays
  unsure (1)..(411): unsure at all n locations; Clone ID: LIB84-010-Q1-E1-F7
accacgcgtccgcgcgtcggcggcgtcgtcaccaactgggcgctcgtgtccatgaaccacgacacgcagtcctgcatggaccccaacgtcatggagggcaaagtcgtggtcagctcctgcgggcacgacgggcccttcggcgccaccggcgtcaagaggctccaggacatcggcatgatcagcgccgtgccggggatgaaggcgctcgacatgaacaccgccgaggacgagatcgtgcgcctcacgcgcgaggtcgttcccggcatgatcgtcaccggaatggaggtcgccgagattgactgcgcccccaggatgggcccgacgtttggcgccatgatgatctccggccagaacgcngcgcacctggcgctcaaggccctgggcaagcccaacgccgtggaccggaccatg

SEQ ID NO: 17586 - DNA, 392 bp, Zea mays
  Clone ID: LIB84-010-Q1-E1-F8
accgtccgctccatccaaccacctcatccctctccgccacgggccgcggccgaccgccggctccgtggcctcgacaccagttgacgaggagcatctctactctacagatgcttggtcaatatccggcggcggcatatgtcaactctccccttatgcgatggaactgccaactcgccgtgctggtcggagtgctctggatcgaggcttgctgctgcgcgccgtgttgggagggaagctgccgtctcctggcgctgggagaagccggggaccctctgtttgctgacggcaagatctccttccttgggcaggcagtccaggaaggtgcaatgggctatcagaagcatgtccgacgacagcggtgaccagtcatgcaacagcactcgcctcttcag

SEQ ID NO: 17587 - DNA, 338 bp, Zea mays
  Clone ID: LIB84-010-Q1-E1-G3
aggacgcgtgggctcagtaacaacaatggttctgagcttgataatacctcttttaacaatgggcatggtatggccctggactggaccagcagcatcagcgactcttgccccttatttggttggactggttgtacagtttgcatttgaacagtatgcacggcatcggaaatcaccttcttgggcagtgattcctaatatcttcaagtttgtgatctgatcaatcgtacctgatatttgggaactgggacttgggattggctatcagtgtatcaagtacttctggagtctactgggagcattttgaggaatcatgggcagtaactaagactgggaaatgt

SEQ ID NO: 17588 - DNA, 384 bp, Zea mays
  Clone ID: LIB84-010-Q1-E1-G4
cccgcaccggttcggcgacggcagtgggcaaccggcgcccgggcgtggggctcaaaccggcggtggacgcaatcgtcgccgggctgcgcgccgccggctccaacccacgccggacgctgttcctggacgacagccagaggaacatcgccgcggggaaagcgctcggcctccgcaccgccctggttggcaagagggcgaggagcaaggaagcggactacgcggtggagaacatcggcgcgctccggcgggccatcccggagatctggggcgaggccgctgaacgctcctccgacaagctgccggtgccggccgtgagcgtggtgaggtcgacgacgtccgacctggactccatcatcatccagcccacgtccatccacgcctaat

SEQ ID NO: 17589 - DNA, 395 bp, Zea mays
  Clone ID: LIB84-010-Q1-E1-G7
agttcatgtacttaagctgtcaaagaacattgactacttgagggatcagatgaattccagctactatcacaaggacatgcatgatcctagtgtcaactctgtaacactacagcagcaagacgaagaaatgcctgaagttgctcccatgagttcagagcctgaggttgagaagtggacatcagttgagattgatagagccttagatttaacaaagtctggagtccctgtggaagatatgcagagcaaagtctgtttcaacaagcttgaagatgattcttctgcgactgcaggtccatgtctgactgggagttcaattgcagcttcatcctataatctgatcagacatcaaaaccaacgtagctctactgtgacatccagtcctgatggtcggtacg

SEQ ID NO: 17590 - DNA, 395 bp, Zea mays
  Clone ID: LIB84-010-Q1-E1-G8
agtgccgctccactgctcagctagcgtccacctccacttcctatcgccatctctccccctttcgtcatccttctctctcctctgccatcgcgtccgccgccccaccgccatccgcgccgaagctgaagtgcggcctccgctacctgtctccgcggcggagtcagagccccctgacgccggcgctgtggaagccgaaggtcagggacccgtggagctccgcgctccgacgctcttctcgactgatgacaatcccaccccgctccagactgccaccagtctcctcctcaccggcgccatctcggtcttcctcttccgcgccctccgccgccgcgcccgccgcgccaaggagctcagagtgcggtccagcgggttgacgaagcccagcaatctcaccg

SEQ ID NO: 17591 - DNA, 311 bp, Zea mays
  Clone ID: LIB84-010-Q1-E1-G9
acttcaacaagcagggttccagaagaacgacaagctgttgcagagggtgctgatgacgacgaggaagacctagaagagatcagggcacggcttgctaaagtgaggtcgtaaatcatatacatatctgagttttctaacctggggagcccatggctcacaaaatatggtgccaaaacccgtgtattgtgaactgagtcgatagcaatgcaattttttttttaattggccctcgagtcgaccatatatgaagtggcactctattgttgtacaacgctacgagagtggcatggaatatcggaatatggatagcg

SEQ ID NO: 17592 - DNA, 392 bp, Zea mays
  Clone ID: LIB84-011-Q1-E1-B4
accacgcgtccggtcccgttcacagtgaagctgccacaggtgagttagcagatattgagcctcaaaatatagaaaaggaaggtttagttgccaatcatggcaaagaagatggcaagttggtacctgtaattgcttcaaggagctcaaagatagtcgaataagttggctatagaagaatcaccaatgatgtaggatgtacgagagtaaccctagaaagtggtttgagagttaattcagatatggactatagaagcagagctccagaaagccacgaggtgcagcatcttatacatctgtcagaacctgctggtttacatgggaaatttataggagaatcttcaggtgctggggacaataactgttctggttcactatgcactgagagtgctgag

SEQ ID NO: 17593 - DNA, 344 bp, Zea mays
  Clone ID: LIB84-011-Q1-E1-B9
cccagacatcatcgtagcatacaccgctgcagtttctagagccctctctgccactcgtgatcccactagtcacgatgcctgccctcgctaagcccgcctcccgcagcgccaagcccgccgcggctccgacgccgaagcctgccgccgccaatccgattgcggccatcgctggtgcctcgcacactccttacttccagatgatcaacgaggttatcacggcgctaaagtgaatgaccggctcgaattcgcaagcgatctccacgtaagtgggggaaaagcaccgtgcgtctcggcctgttaacttcaagaacatgccttccaatcagctccgttggtccgcagtc

SEQ ID NO: 17594 - DNA, 403 bp, Zea mays
  Clone ID: LIB84-011-Q1-E1-C3
aacaaaactgatgtggcgacggacaacgaagcaggtcatggcgtcccagccgcagcttctgactctgtggtggatgatggcgcgcatgccgcgaccttggagccggaagaagaatcctccgaccctttcggtttagatggtcttcttgagcacaggcctaagaagacgtctgggagagctcgagagaaggcagtcgcggctctgaacagaaagacggtcgaggaggaagcaaagagggttctcaagtcgcagcgggaggcccttctgaaatgcctggaaatagccgctcggcgctacagaatcccgtggacacagaccgccattgacattttggcgaagcacgcgtacgacgacgcggcccggttcacacggcggcagcgggacgcgatcgctaaggcgttgg

SEQ ID NO: 17595 - DNA, 327 bp, Zea mays
  Clone ID: LIB84-011-Q1-E1-C4
aggacgcgtgggcggacgcgtggggcccggcctccgcaccagagcgcgaacctggccagcgagttgagcgcgatggcgagcaccagcgccaggaacagcgccgccagcaggatcaccgtgttggtgtcgaacgtcgcgtcgacgaccccgggcgccgccgcgcgcgctcctccgacgccgccagtgccgttcaggggcggccccggcgcctcggaggagtcccggtggtccacgtcgcagcacgtcgctcgcacgaaggcacgcgcattcctgccgtgctcagtccgcggcagcaactgatagctagtcgccaggcgcgttccggga

SEQ ID NO: 17596 - DNA, 406 bp, Zea mays
  Clone ID: LIB84-011-Q1-E1-C8
accacgcgtccggagttttggcttgtccggatggagaagcccggagttgaagttgtgacaaaggcccaaatggtggatcactacacccaaatccttatgaaagtgttggggaacgaacatgatgctcaggttactatatatcacgtttcatgggatagggattatggtttctgttgtcatattgatgaagaatgcgcaaaagagttagctgatgttcctggagtgttatccgttcaacccgatactaactttggatcagacaacaaaaattacaaaggtgatgatggcgtgaaatcatctgaagggactggatcggtcgatatcaaaactaaaagggtctttgttacaagcctttcattttagacatctgataaaaccctaccggcagcgtttgagcctttcggtg

SEQ ID NO: 17597 - DNA, 400 bp, Zea mays
  Clone ID: LIB84-011-Q1-E1-F11
gtcgaggacgcgtccgggaaattcattgcctgctaataccttaaattacatccaaaaacttcatgaggaatttgagacctcaatgtcagatgatcttcacacttcagtggcattggctgctatttctgagccattgaaagttatgaatgatctgttgcacactcgtaagggaaagaagcaggacaaaaggctggaatctctttctgccttagaagagaaaataacactagttctctctgttcgaagattgctaccttcaagttatcatgatgctttgcaacagctgcgggataaggcactgagacgagcttccatcaccgaggatcttgtggtgcagaagattgaagatatgactggagcaatgaaggcaaagcagtatgacaaatccgaccagatccgg

SEQ ID NO: 17598 - DNA, 357 bp, Zea mays
  Clone ID: LIB84-011-Q1-E1-F9
gcccaggacgacacacgacgctaaacttagtcctagcaggagacagagagccgggaaacccgcgacaggctgccgtgctatggactacggaccgtcgagtccgccatagcgaacgacggagaaggggatggccgggatccggccgatcatacacgactgggagccggtggttgtgccaaagactgcagccaccgccgctgccaacaacgatgacaacgccgtcaacgccgcgcgccgctccggcgcggccatcgagaccatgaacaagtacaacgctggtccgaacaccgcggcctccatcggcacctccctcaacaccaagcaccccgaccatcagacagagagcttcgcccatcg

SEQ ID NO: 17599 - DNA, 390 bp, Zea mays
  Clone ID: LIB84-011-Q1-E1-G3
aaccatctaccagcgactcatcgagcgagagcagcacacacgcagctagctaggagcagcagcagagcagcggcgatggcggcctccatgatctcctcgtcagctctggcggtggcgcctcagggcctgccgcccctcggccgccgcgcctcctccttcgccgtcgtctgctccaagaagaagatcaagaccgataagccctacgggattgggggtggcctgaccgtcgacgtcgacgccaacgggagagagggcaagggcaagggcgtgtaccagttcgtcgacaagtacggcccgaacgtcgacggatacagcccaatctacaacgaggatgagtggtctcccaccggggacgtcgacgtcggtggggacactgggcttctgatccgg

SEQ ID NO: 17600 - DNA, 414 bp, Zea mays
  Clone ID: LIB84-011-Q1-E1-G4
aaacacgcgtccggtcaagcttgcttagctagccgccatggcctccctcgccgccgtctccgtgaagcccgtggccatcaagggtctcgccggcagctccatctccggaaggaagctcgccgtcgccaggccgtcggcccgctccatccgcaggccccgcgcagccgccgtggtggccaagtacggcgacaagagcgtctactttgacctcgacgacatcggcaacaccaccggacagtgggacctctacggctctgacgcgccctcgccctacaacccgctacagagcaagttcttcgagacgttcgcggctccgttcaccaatagaggtctgctgctcaagttcctgctgctgggcggcggctcacttctggcctacgtcagcgcgtcggcgtctaccggacttcctgccga

SEQ ID NO: 17601 - DNA, 433 bp, Zea mays
  Clone ID: LIB84-011-Q1-E1-G9
ggtccacgcacgcgtccgaatggcattgtcatccgcaacccatccagagcgaatccagctaacccttcaattgagcttggacctgagttcaagaaggttgccaatttccttgctcggttcaagtccatccccagcatagttgagcttgacagcttgaaggtttctggtgatgtctggtttggctctggaattacactcaagggcaatgtgacaattatcgccaagcctggagtgaagttggagattccagatggagacgtacttgagaacaaggatgtcaatgggcctgaggatctttaagcaatgtctgtcatcaccagtttttcccaaggacatgtcacaggaactgccgagcctaatcactcctactgagctctatatttttgtaattttcatgtgcattccgattccgctgcgagggtcatgtgagccc

SEQ ID NO: 17602 - DNA, 331 bp, Zea mays
  Clone ID: LIB84-012-Q1-E1-A12
tcccgggtcgacacaagactctaaactgagtcgtagcaaactaataggcggtaagatggatgacatcacagttgttgtcgcacaagtgaagacagtagtggtcccataggacgaggttcagggtggcgacacagaagaacataaggggaatgagcagggcgctgcagctgtggttgcatacaaaatgaatgatgaagaagtcgcttgagttttgggaccatcctcattttacctttttgtgatgactgtattatactgcacataaaggaattgaagcaaaatacatttgtgtgattgtgtctaaaaggaaaagaaaagttctagatcgcga

SEQ ID NO: 17603 - DNA, 111 bp, Zea mays
  Clone ID: LIB84-012-Q1-E1-B10
actcacgggtcgacacaagcctccagagaaacacgtaacattcgagattttggatacaaatcggaaaaatccatttatattgtttttacatcgacttgcagttctgatgtc

SEQ ID NO: 17604 - DNA, 416 bp, Zea mays
  Clone ID: LIB84-012-Q1-E1-B12
aaactgagtctaaagaagctcaaccagtccattcaactgaattcacagaagtgcactgttcaaagccaactgaatcagcagctgtagatgtcccaaatggaaacacatccattaccagcagctttgtggaaaagcttgttggtattcgtcctggttctgcaaacctcaatagctcaggggcaaatcaatcagcagccagaatacctgatccaattcatagtcatacagatgggcactcagatttttcgtcatcctttgagcacaataacatgactggcaaacatacttcaataagcgaacttctagaatttgaggggagtgctgatactggcaccaagatatactcaactgacatgagaaataacgctgtgtctgcatcaagcttttcaggcattgcacaaaggtttcttgctaat

SEQ ID NO: 17605 - DNA, 391 bp, Zea mays
  Clone ID: LIB84-012-Q1-E1-D12
tacacacacgtctggcaggctctagcttcaaagaggaaggagcttgctgaatttaaagggaaattagaaaacgcaagaattgaagccaatttagtaagagttgttgtagaatcactcagctcagagcttgatagggagaaagcttcacttgctacattgcagcagactgagggtatggcatgcatcacagttgcttctcgagaagctgagctcgacaggacagagcaagagatagaattggtacataagaaagaagcagaaactcgggaaatgatggcggagcttccaaggatgttgcagcaagcagcccaggaggcagacgatgccaagatggcagctcatttgggacaggaagaactgagaaaggccagggaagaagctgagcgaacta

SEQ ID NO: 17606 - DNA, 440 bp, Zea mays
  Clone ID: LIB84-012-Q1-E1-D9
ctcgcgggtcgacacaagcctctacagtgagtcgatagtatgcagcctggcttcggaaaccagcagttcggttcgctaccaccaacatccatgctgggcatgcaattcggtggcatgcagcctccgcagatgtatggcggatcgcagccagtcatgatgtacccgcaacaaatggcagtggcccagtatggagcaatgccgcggcagcagccgacgtatggtggtcgattggcgggttacatgcagcatcctgctgtggctgccgcacactactacaacaaccaggggatgtatggctaccccggtgcgaacgggctgtcacagagcatgtatggcctctcggtgcaggacaactcgtccatggggatgaggtcgtcttaccagactacgacggcgccaccctccacggggcaacctatgaagccgacgaagcccgaaga

SEQ ID NO: 17607 - DNA, 437 bp, Zea mays
  Clone ID: LIB84-012-Q1-E1-F9
tcgcgggtcgacacacgcctctagagtgactcctaggaggagagagagaagtgggagacccgcgagaggctgccgtgtagggactagggaccgtagagtaagcgacagcgaaggagggagagggggatggccgggatcgggccgatcagacaggactgggagccggtggttgtgcggaagaaggcacccaccgccgctgccaagaaggatgagaaggccgtcaacgccgcgcgccgctccggcgcggagatcgagaccatgaagaactacaacgctggtatgaacaaggcggcgtccagcggcacatccctcaacaccaagcgcctcgacgaatgacacagagaacctcgcccatgagcgagttcaagtgacctgaagaaacatctcatgcaagcaaggctcgatcatgaagttggcccaggcacatcttgctcaga

SEQ ID NO: 17608 - DNA, 407 bp, Zea mays
  Clone ID: LIB84-012-Q1-E12-A3
agagacgcttcttggtcaaatttagaccttgatcctggactattcgcacttcttggcgcggaatctttcctcggtggaacaatgaggatgactgtgtcagtctgcgtgatacttctggagctcaccaatgacctccttatgctcccgttagtcatgctcgttcttctgatatcaaagaccatagccgacagctttaacacatgggtttatgatcagattgtggtgatgaaaggcttgccattcctggaagctcatgccgaaccatacatgacgcacttggttgctagcgatgttgtgtctgggccactgatctccttttcaggcgtccatagagtggggaatatcgttcaggcgttgaggatcacaggccacaacggatttcaagtggtcgatgagccacctctatc

SEQ ID NO: 17609 - DNA, 411 bp, Zea mays
  Clone ID: LIB84-012-Q1-E12-A8
ctcgcgggtcgacgcacgcctctacactgacgttgtgctactatccgccctcgccatggccatgaccgtggcatccgcctggcttccgtcgaccgcctctcgccggagaatcttatcctctccgctcccttcgttcgcggttcctatctccatccacatgccacggcgggcgccgcctcgcagtcccttccctcgaaagccgcgcctcttcgtcgcctccgcgcagctcgatttctccagagctgttcaaacagcatggagggtccgtaacgatgctgtggatgcaggaagtaatcgtgtcgcaggttcagttccacgagcaattgccaggataggtgttgcctttgctgctgtgtcggttgcctttttccgtgtcaaatccattgtgtccactgcattatttgttctggg

SEQ ID NO: 17610 - DNA, 234 bp, Zea mays
  Clone ID: LIB84-012-Q1-E12-B3
gtcgacacaagcctctacactgacgtcgtgttattgcacatcactagagcgagctgtgtgtgtgtgtgttcgtcagttcctcgatcatggcaaacgcgcatgcgcaagtggctgtaaggttcatgatgtatgtgccaccgcagcaggtggtgtctgtcatgcggctgtggaacgcgccgacgagcctgagtaccatcacctatgacgacacggagatgctggttctgtgctggt

SEQ ID NO: 17611 - DNA, 219 bp, Zea mays
  Clone ID: LIB84-012-Q1-E12-B4
atacatgactccaacctaacgtgactcgtattaaaccgcgggcttctgcactcctgctgccactgcacctgcccatgccgccctaagcccttctgacgagctcatggaagcacagcgccatgtgcctgtcccccaggccaagctgcggcggcggcatccgccgcggacaccaggcgcagctttcaattagaggcgcagctcctcacgttcacgcgctgg

SEQ ID NO: 17612 - DNA, 413 bp, Zea mays
  Clone ID: LIB84-012-Q1-E12-C3
agtcgacatcgtcctcgtgaaggacggtctacgtgagattgtcctcttgtcgagatcctcacgtcccggtcctcaccacgggtggccacggggtgtgacatgatactaggagatgtaacggagcaaagaattctgagaggagccaaagatgaggataagggatactgaagatcctcgtcgagctggacaaggatctcaagtctgctctgtgcgatttggaagacgtcctggatgttattgaatatcgctgaatcgagaagaaagtcatcggtggtgacaaaaagttgatcagcactactatttgcatctgggcgctgcaagctattggcgattggatcacctactggaagcgtagctcgttcgggcaaaagctgttgcagtgcgcgcgcccagaaccagtatcagaagctcag

SEQ ID NO: 17613 - DNA, 387 bp, Zea mays
  Clone ID: LIB84-012-Q1-E12-C4
gggtcgacacaagcctctagaggacatccaagcagtccagataagatttgctctggttaggctacctccgcgccgcgctggaactccctcccggtgaggttgttgaaaccgacaaggaacggggacgtggggcccgaggaaggtcacgctgctaatttttttccttcgcgatcgatcccttccgcctccggattcgccctgctcttgttcctccgctgttttctcgatcggttggctggtgactctgcccctgcccctgcccctgccccggccccgattcgggggaatctgattcgccgttgggcgggcgggagagattgggttcttgggtctggtgccggtgcgcccggcgtaatttgggagcagatagaaacacgaaaggggagc

SEQ ID NO: 17614 - DNA, 351 bp, Zea mays
  Clone ID: LIB84-012-Q1-E12-C5
cggacacgtgggcggacgcgtgggtttttttatttatactcttcattgtaaattataagacgctagatataatgttttaattatatacacgatatataaacatatactagtaaacataatatgttaataaaaagataaaagtattttacaatttggagtggaaggagtagcagcagtgcaaaagagatgttaaaaatgcctcttcgtgcagctctatgatggcctacaacaacatccagcgccaagtctggcgcgaaaggcctacgaagcctgcagcccatagagtcgacgatcccaactcatgtgagtggggagtccacgatccagggtcatgtgaatgtgggctgcgcg

SEQ ID NO: 17615 - DNA, 225 bp, Zea mays
  Clone ID: LIB84-012-Q1-E12-C8
gggtcaacacactagtctaaagtcacttatactacgcaatatactgctcacaatgcactgcatttgggtcagtctctcaatacggcactgcgtgttcgtggagacacatctagcggcctaaccttattcccggcgtatgtgctgctgttactatcttaccatcttaattcttatcatacatctccatattcgacatactcttgctgaagttctgtttttcctatc

SEQ ID NO: 17616 - DNA, 405 bp, Zea mays
  Clone ID: LIB84-012-Q1-E12-D1
gcttgtgacatcgcggcgcggcgctgtgaaccacctctctattgaccgtcaactggtgctttccccggctgtcttcgcgcgagcaccgaagtgttgaacacctagaagaagtggtgtctgaagaaggagttcacttcagtgcctgctgatccagtggtggagtttcatctaactgcttaccacaatagaaggattttagatcttctcctgcaataaggaaagaatttgatgacttgggctttattagttgcttcttgtggaggtcttgaagcttaggttacttatgtgtatattttatggaaaggtttcacctttccaaatattgtagttaagttatgcactctaaagactatcaggacttgtaataatttcaatcccttttgtggtgtaagacttcagttctgg

SEQ ID NO: 17617 - DNA, 380 bp, Zea mays
  Clone ID: LIB84-012-Q1-E12-D2
gtataactgatcgttgaggagagcagtgatcaaagtctcaactctgaggcagatgatgtccttgccaggagtcgtcgcactcgcaatgtgatctttggcaactattgtaagtcgcatcagaacattgcgctcaattcagttcatggtgatggaattgcgccgtttcatccatctgggtaccataatatgatggggtcacatcatcgcccgaatcaatgaattaactggagcagctaggactttaatattttgcatcgtgtggaagtcataattcttatggtacttatgtgtataatttattgacaggtttcacctttccaaataccgtaattaaattaggcactccaccaactatgacgacatgggacacgttcactacc

SEQ ID NO: 17618 - DNA, 399 bp, Zea mays
  Clone ID: LIB84-012-Q1-E12-D4
attgattatcgtaaggaggtactcactgagaaggttcctttccagaactctggtcctgcatccattaataaacattcagtgctccagaataacggtaaaacacgagttaaggatccagagaaaaagcagcaagcgggagacgaagaagctcgcaaagaagctggtaatgaaaaatctcatgaaacaggagcttcatctcagagaagatgtgatcctccttcgaatcatgacgttgaggctgaccaggaaggtagtcttacaacttctatccaatctagtggttctgatgaattagaagctaaaggattgcaagagaagaaggcagctgtatcaagtaaatctagaagaggtatttcaaagcgggatcaacatatgcctacttcaccaaggagaagaaat

SEQ ID NO: 17619 - DNA, 391 bp, Zea mays
  unsure (1)..(391): unsure at all n locations; Clone ID: LIB84-012-Q1-E12-D5
ctcgttgttcaacacaatcctctataataagtcctattacggcaagcaaccacgggcggagctcggagcgtcctcctcctcccgtctataaattcccctccttttcttcctccatatataagggccatcagatccaagaagagggaagagcaccaatgatcttcggcgcccgttcaggatccacatcttcccgagcgaattcatggttgacctcttcctccttctgaccggcgggggggggcttggggatggcgggtgantctcaccaatcaaattttcatgtccgatctctacattcagatcccaactgccttcgatcccttcgatgacgccaatgcttgggactctggtgcagcaccagggtcaaacgactagcttcaaattcgcatcc

SEQ ID NO: 17620 - DNA, 94 bp, Zea mays
  Clone ID: LIB84-012-Q1-E12-D8
gggtcgggacacgcctccgaatgaatatctcacggaggtacccactgagaaggttccttacgagacctcaggtcgtgcatccagtgacagacat

SEQ ID NO: 17621 - DNA, 400 bp, Zea mays
  Clone ID: LIB84-012-Q1-E12-E2
caacaccatttcagcatcatttcctgggcttggttccttagttagtgatcttcacaggtccttaattaaacaatatgggacttctttaagtctagaacacaagagggttcctgcaaatgcggctagcactcaattttctgaagcattggcccaagcatggtctgagtttaatattgacagtgctgtaattatgatgattgttcagccagaagagagaaatatgtatgatcaatactggctttccaaacatttgcaagactcacatggcataacaactataaggaaaaccttatcgcaggtggaagcggaaggccaggttctcccagatggaactcttcttgtacgtggccagaaagttgctgtaatgtattttagagctggctatgcaccaaatgattac

SEQ ID NO: 17622 - DNA, 389 bp, Zea mays
  Clone ID: LIB84-012-Q1-E12-E3
gggagagggatatgcatagggatgacagagatcgctatggcgattatcacaggcacagggatcgcgattcggaacgtaatgaagactgggacaggggtagatcatctgggatacgcggcaggtcaagggaggctgaccactctaagcgcaggcggatgacacctcagtagtcgtagctgggtgagctactaatgtagaggcaaacgatgatccagagccgagtcttgcttgcacactggcatggttaacagctagcatcttcttgctgcctctggctgtggtggttctaatatcttgtgtctccggcaatgtgttgtagcaagaacgagagatgaatgtctggttgggacctgttgagctgtgcgaagatggacctccctggatgatag

SEQ ID NO: 17623 - DNA, 289 bp, Zea mays
  Clone ID: LIB84-012-Q1-E12-E4
tgaagaagagagcagttgacgatggctcgtatcattcataccgccctcaagtccacgggaggcaaggtcccccagcaagcaactcgcacattttgcagtcatgaactcggcgccgacgaccggcggcgtcaagaatcctcatatgtacatgtccattgccctggcgctgcgcgagatgtgtacggtatacaatatcacggagctgcttattggcatgctgcccttccatcgcctgtttcccgagatctctcacgacttcatcacagacctctggttccatagtcacgcc

SEQ ID NO: 17624 - DNA, 435 bp, Zea mays
  Clone ID: LIB84-012-Q1-E12-E5
ctcgcgggtcaacacacgcctctacactgtttccaatatccttcgcgccgtcgcgctccaggagaagcccggcctcgtcatcctcggcaagcaggcaattgatgatgactgcaaccaaactggacaaatgttacctggattgctcaagtaggcacaaggaacctttgcctcgaaggttacattggacacagaaaaacaaaatgctactgttgagcgagaagttgatggtggaattgaaaccatctgccttgatctgccagcagtgatcaccacggatttaagacttagccagccaacatatgcaactttgcccaacataatcaaggcaaaatccaaagttactaagaaagtcgccgctgaagaccttggagtagatattacattagacattgaggtgattgacgtcaatgaatcaccacaccgaaaatcaggggt

SEQ ID NO: 17625 - DNA, 302 bp, Zea mays
  Clone ID: LIB84-012-Q1-E12-E6
taacgaggccttcgccgagctcaaggtcaaggagctcaagaacggccgcctcgccatgttctccatgttcggattcttcgtccaggccatcgtcaccgggaagggcccgctcgagaaactcgctgaccacattgcggaccccgtcaacaacaacgcttgggcctacgccaccaacttcgtccccggcaagtgagggatgcgccgccggtgacctttaggtgtccggatgcatgtgagcgcacgctggttttcggtttgtgccatgatgtacactattgttcaatcgacagggaatacttgtg

SEQ ID NO: 17626 - DNA, 418 bp, Zea mays
  Clone ID: LIB84-012-Q1-E12-F3
gggtcgacacaagcctccataacgcggcatctaagctatccgttgagacaattgagaaaatgatggaagatccagctgtgcagaagatggtgtatccctacttgcctgaagagatgcggaacccaaattcatttaagtggatgctgcagaatccaatgtaccgccaacaactacaggatatgctaaataacatgggcgcaactcctgatcaatgggataaccgcatgcttgatcaccttaagaacttcgaccttagcagtccagaagtgcggcagcagtttgcgcaagttggcatgactcctgaggaagtagtatcgaaaataatggcaaacccagatgtagctgttgcattccagaatccaaaaatacagacagccatcatggactgctcgcagaaccctcttaacattgtaaaata

SEQ ID NO: 17627 - DNA, 310 bp, Zea mays
  Clone ID: LIB84-012-Q1-E12-F5
cgcgctggtcgtcgcaacaccctacagtgacgtcgtattaacgcgtccgcccactgcgtccgcggacgcctgtgttaacttctactccgaaggtggttggctcacatgcctcatcagaggccgtctcaatgttcatgttgagtggatgctgcttcaaccgcagtgccgctggtaaccccaagatatcttagcagcgatgaggactacgcgtgatcacggagagggacgcatccgtgatcaccttagacgtttccacattagaagtcgatcagtgccgtaccattttgctcaactggctatgactcctgaa

SEQ ID NO: 17628 - DNA, 288 bp, Zea mays
  Clone ID: LIB84-012-Q1-E12-G1
ggtccagacacgcctctgaggacacgtgggttcctaaatgtgccccatgggttaggtgacatggcaactacaaatgcctccacattgaccttgtattgcctgccaaggatgctgttttacgagtcgacagtgttggtaccgtatcatcagctcttttgatcagctattccattcaaacacggaagccagaccttatcattaatgctggcattactggtggcatcaatgccaacggggcaagcattggggatgtaatcgtggcatcagatctttcattccatgacaaga

SEQ ID NO: 17629 - DNA, 208 bp, Zea mays
  Clone ID: LIB84-012-Q1-E12-G2
ctccaacgtaaagtgagtcatatcaccgaccacctcgctgaccctgtcaataacaacgcctgggcctacgctaccaacttcgtccccggaaagtgatcgagggcatagacatagctgtatccgtgtagcgtagacatacgtgctcggagtatgtcctgcaggagatgtagcagtatttgtggtgaacggaccataggctcagagattg

SEQ ID NO: 17630 - DNA, 392 bp, Zea mays
  Clone ID: LIB84-012-Q1-E12-G3
aacacacgtccgcgcctcgtatgcataccactccctcttcgcctatttcgaccgcgacaacgtggctctcaaaggatttgccaagttcttcaaggaatccagcgacgaggagagggagcacgctgaaaagctcatggagtaccagaacaaacgtggaggcagggtgaggctccaatcgattgtgacgcctttaaccgagtttgaccaccctgagaaaggagatgctctgtacgctatggagctggctctggccctggaaaagctggtcaatgaaaagctgcacaacctgcatggtgtggcaacaaggtgcaatgatcctcagctgacagacttcatcgagagtgagttcctcgaggagcaggtggaagccataaacaagatctccaagtatg

SEQ ID NO: 17631 - DNA, 402 bp, Zea mays
  Clone ID: LIB84-012-Q1-E12-G5
aatgtgctggactacattagtggcatgagcaaggggactgatttcgtgggtaaagaaagggaaactttcatggatcttctcgccgcgctgctggtgagcgaggagttccaaggcatagtgtcatccgaaacaggaagctcgtcaagagaaggtgagcaggcaggcagtggaccagaaggcacagacagcgtcactgtccctactagcgctgcggcggctgatacggaggcatccaccgtgccaaatagctccacagatacggctctggtgtggctggcggccataacgagtgtgatggtgctggtgtcctccaacctcggtggctcaggctacttcaacccgtgaccgtgagtgaacgcaacactggctgtaacttgtaacggtgacaacaagaaagttctc

SEQ ID NO: 17632 - DNA, 398 bp, Zea mays
  Clone ID: LIB84-012-Q1-E12-G6
atctgacggggcgtatcgtacgtttcggcggcgaagctggtatccatggcgcgaggcagtccccgcctcgccatcatcgacgtcagggatgaggagaggagctaccaggctcacatcgctggttcgcaccacttcgccagcggcagcttcgaggcgcggatgccggagctggtgcgggccgccagcggcaaggacaccctcgttttccactgcgcgctgagccaggtacgaggtccaacttgtgcgcggatgttctcagactatctatcggggaccaatgatgattcaggggatgggaacatcatggttactggagtcaccggtttaacggctgggaggtttcagggcagcctgtcctgcagctgcaccgacgctccattgcatagggacgtgttctt

SEQ ID NO: 17633 - DNA, 413 bp, Zea mays
  Clone ID: LIB84-012-Q1-E12-G8
tagtcttcttcaaggcagctggatacctagactgcgcaattcgtcatgtacttccgaagatgccactggaactaaggagacaacttccagtcgacctggctgaaggaaatctcaaagctctaagcctgcaagccttgggtcagggggttgacatgcagctcggcttggctattgatagtccaaaggccactttagcagtcaaaaggcgcttagcctgtgagatggtcaaatattggcaacaagttcaagagagcattccagagcttccagtctctgatggatggggaaaaaagcaccggctatttggtaagtggaagtatgtttaagccaacgctgcagcatactaattccacggtttgactcttgaccagggaaataccgagaaatcccatggaatggcaataactgcacta

SEQ ID NO: 17634 - DNA, 409 bp, Zea mays
  Clone ID: LIB84-012-Q1-E12-H3
catgatcagctctacaaaaaaattaagtcgaagggggttacaatgacagcactgttggctaaggcgacagcaatggcgctggttcagcatcctgtggtgaactccagctgcagggatgggaagagcttcacctacagcagtagtatcaacattgccgtggcagtggccatagatggtgggttgattacaccagttcttcaagatgctgataagcttgacatttattcattgtcaaggaaatggaaagagttagttgataaggcgcgagcaaagcagttgcagccccatgagtacaactctggcacgtttactctctcgaatcttggtatgtttggagttgataggtttgatgcaatactgccacctggaactggagcaatcatggccgtcggggcatcagaacccacca

SEQ ID NO: 17635 - DNA, 413 bp, Zea mays
  Clone ID: LIB84-012-Q1-E12-H4
gcagtctgcagtggccactggatgagaaaactaagatgagttccttgcagacccaacatgcagcgagtgaagacgcatccgtttgatcaaagcagagttcaattctctgctgtctttatattaagtcttgctgccatgatgctgagacttgtgacttccgagagcagtctttgtgtttgatatccttcctgttgggtctgcaaaagtccagcctttgggtgatgctagtttcagagagtacagcaattccttcatcgttgtcatgctcacgtgagttggatccactactgagggatcctgttgagaataaactaagcctgaagaggaaatgtactgcagtggctaccgagctcagggaatgccaagaacaggcttgcttcactggaactgttgctggctcaggagatagaagc

SEQ ID NO: 17636 - DNA, 401 bp, Zea mays
  Clone ID: LIB84-012-Q1-E12-H5
ctcgccggtcgacacacgcaactgagaaaaggctaagttgacgctggagacgtattaccagaatatcgagtccctgctatcaacatatgagaacattattgttaaagtgcaaggagatgccacagtggatgctgtctttgctaagatcgacgagctgctgggttctatcctggagaagaaaaatgaaatggtgtccagcacatgagcaaggtaaaaatgattgggtgcagtgcagatccgacaagttcatgtgatgcaagtcacctctcatgatacgaacttctccaggggaatatatcggaagcacaagacgacacgtacaagtaatgtaagccactctcacgtaatggaaatttctccatgtggatgttgtcaaagcatacgatttgttttctccaatt

SEQ ID NO: 17637 - DNA, 386 bp, Zea mays
  Clone ID: LIB84-013-Q1-E1-A1
ggctgactgcagacagccctgtggaaaacaagcggactgctaggagcaagccaaaggctaaccagaaccagaaggataccaatgcaaatacccgtccacatgttaacactcccaatcaagttaatgctccaaatgcttatcagacaacgcagcagggatactcagccgaaggaagcagcttcttttggaacccaagtgacgggacttgaagacgcaggcagcatcatgtagctgctcatgcattgcatggcacttatcaagcaaaaacctctaacatcatcgaccaagttggggctgagtagcttggcccttcacatttctaaattctaaatggttggtttctgcacgggggcctggcaggtcggtgtatttgaattttgaaatgc

SEQ ID NO: 17638 - DNA, 427 bp, Zea mays
  Clone ID: LIB84-013-Q1-E1-A11
acggtcgcttgggcggacgcgtggggcaagtcgcatcgcacgtacggtctcaggcgcatcggcctcgccgctgcacaacgccggagacgagacgacggcggctgcgggatgacggtcttccacttcctcaactgcgccttcctcaccttcggccctcacgtcgtctactactccgccacgcccctgtcagagtatgatacaatcggcacttctataaaagcagctgctgtttatcttggaactgcgcttgtaaagcttgtttgcttggcaacattgctcaaagtacctgagaatgatagctttgacccctatcaggagttaatgaaagtttttattggattcatagatgtagctggactgtattttgctttgacccagctgacccacagaaacatctctcagaatcataagttccaggctgttggtc

SEQ ID NO: 17639 - DNA, 426 bp, Zea mays
  Clone ID: LIB84-013-Q1-E1-A12
ctcacgggtcgacgcacgcctctaaacagtgtcctgctagcgcgcacctcacatccgccgccagcaggtgccaccgccatctctgctttctctctctctctctctctctctctctcaagcaacgcccgcctgcccgcccgccatggcgaccatagccacgatggccctgctgaagcccgccaggatcgtggcgcggtcggcgccgccgtccaccagcggcagcgtctcgctgcgcgtcccggcgcgggccaagaaggccgcggtgtccgtgtccgtgtcgtccgcgctggcgggcgccttcttctcggcgctggcgtcgtcggacgcggcgctggcggcgcagcgcgtggcggacgtggcggctgcggccgactccgggagcgacaaccgcgggcagctgctgctcttcgtggtggcgcccgccat

SEQ ID NO: 17640 - DNA, 241 bp, Zea mays
  Clone ID: LIB84-013-Q1-E1-A3
acgatcctgctgtcggcagtaatggcggcacagtgcgcatgagcttgcgcgttgctgggcgtttaaaggttcactcagccacgttatcaatgggtgccacattggctcgtaccaatcagtttcaatgtctcgtctactaagctcagtcaaggtgtttttcatacctgcggcacataaacttcatttgtttcgggatctgatcttggtgctagacaccgacctctaaacgctgggggctacc

SEQ ID NO: 17641 - DNA, 370 bp, Zea mays
  Clone ID: LIB84-013-Q1-E1-A4
accacgcgtccggccggtctcttgctctgatagcttgcgccaggacgtacgtacgtacgtagatcgatccatcgatcgctagctagctgacgaccatggcgtccctctcctctggcgccatcaccgccccttccttcacgggcgcgcccgctcgcgcagtggtcagcaaggggtccttcaccgtgcgtgcctctctccgcaaggccactgccaccgccgccgtggccgttgccgccagcgtcctgcttgccggcggcggcgccatggcccaggaggtgctgctgggcgcaggcgacggcgggctcgtcttcgagcccagccagttcaccgtcaaggccggcgacaccagcagccttcaagaacagcgccg

SEQ ID NO: 17642 - DNA, 436 bp, Zea mays
  Clone ID: LIB84-013-Q1-E1-A6
aggacgcgtgggccggcgatcgcgaccgagttcctgctgctcatggtggcgctggacaagctctacttcacgccgctaggcaagttcatggatgagcgggacgccaagatccgcggtgagctcggcgatgtcaagggcgcctccgaggaggtgaagcagctggaggaccaggcggcggccatcatgaaggcggcgcgcgccgagatcgcggcggcgcttaacaagatgaagaaggagaccaccgcggagctggaggccaagctggacgagggacgcagccgtgtggaggccgagctcgtagaggcgctcgccaacctcgaggcgcagaaggaggaggctgtcaaggcgctcgacgcccagatcgcctcgctcagtgatgagatcgtcaagaaggtgctcccatccgcgtgatgaaaccaaaccggccctgccttat

SEQ ID NO: 17643 - DNA, 336 bp, Zea mays
  Clone ID: LIB84-013-Q1-E1-A7
agcatattggcgttggcatcaccgtcggcattgtgcccattaccatgccgccgctgcccgcggccgacgatttactcattctcgagttcatcgcgagcaaccgccgtatcccccacgccgtgttcaactccttcatcgcctcccaatccccaccctccgccttctcccgcacctcacagcgcctccgaaaagccctagtgctccgcgccctcgacgccgccctctacaccgtgggcgcctcctgctcctccagcctcctcctccacaaggcgcgaaaggtcctcgccgaccccgacgcagccgcctgcttcccccaccagattccttttacaagaa

SEQ ID NO: 17644 - DNA, 398 bp, Zea mays
  Clone ID: LIB84-013-Q1-E1-A8
acaagcctctatagtgacgtcgtattaagacacttgctcgccttcgcgcttgtgcttcttcgaccacgttctcgtgattttgacaaccaattccccttccttttcttcgaccgcatttgccggtactccttgcatccgcatattttttttccccagaccatgctgcacatgcatggatggtgagcgagaagactagatacaatactgtatgagccactcggtctcaaagtgggcccctgcctagctttcctcctgtaaacagagctaataagttctggcgttctgccctgtatctacttgctgttcttaacattttagtggccagttaaaacaatctttatggatccaactgctgaaggattctttgtacctgtagtcatgtatagttcaacaagggg

SEQ ID NO: 17645 - DNA, 405 bp, Zea mays
  Clone ID: LIB84-013-Q1-E1-A9
tcacgggtcgacgcacgcctctgaatcgacacctgtgacgtcgctgtcgctcaagcgcccgcgcacgccgcggaagcggtccagccagacgtacaacgaggcggcggcactgctcgcgtccatgtacccctccgtcttccccgtcgccaggggcggcgccgcgccgcgccgcctcctcggcctcgcctccgcgctcgccgacgactcgtcctgctccgacctcctcgcgccgttcccagtccccggcggccacgccgccttcctcctccgcgacctgacgccgcggatccccgccgcccaaagcctgccgtcgcccgctgccgtcagcagcgtcttcagcgagttccgcgacccggcgccgtctcctgggacccctgacgacgctgcggcggcgcctgacgagcg

SEQ ID NO: 17646 - DNA, 424 bp, Zea mays
  Clone ID: LIB84-013-Q1-E1-B1
gggtcgaggccgcgtccgcgtacacgtagtggactgagcttgtgcgacaccgcccgactgtaggtcaagacaacgagccccaaaaagtactgtgttcggccaaacaacggcatggtggcgccccggtccaaagctgacgttgttgtcacaatgcaagcgcagcgggacgcgccaccggacatgcattgcaaggacaaattccttgtgcagagcgccatcgtggccaaggagaccatgccgaaggaagtcactggagacatgtttaccaaagattcaggcaatatagtggatgaagtgaagttgaaggtagtttatacagcgccatcgtcctctcaaagcgagggatttgaggatggtaatctcggcagtttgagttatcaagaggaaacaaaagaacccaaagaatcaggaaaaataatctctg

SEQ ID NO: 17647 - DNA, 165 bp, Zea mays
  Clone ID: LIB84-013-Q1-E1-B10
ggaggcttttgccgacgcggatttgcctggagccagccaagcagagcgcagaattgggggtgtttggccgtgcaaagccagaaagttctcggtttggctgccgaaaccgcttgaagcgaccaccatctcatgggcctaatggtccgggttcggcacaagtagggg

SEQ ID NO: 17648 - DNA, 356 bp, Zea mays
  Clone ID: LIB84-013-Q1-E1-B2
gcagaatcagcaaatacccataaagggaaacctcgccaaaattagaacagaaaccaaatgtatccctgatcttatttttcagattgaggattatgagaagtatttaatacagctaagcaaactaactaaggtaaaccttttgaggcatgccaaacgcagtgtagcaagagacttccagataaaagataaatctgggggacaacaggaagatgatcacattccagacaatgctgcagcatctgataacgaggctgataaggacgcaatgggtccaaacgcaccagttgaatcatgtgctgacgatgctcaaaaatcatacgctgacgaaaatgcatcatgtgaaaatgggcatgatg

SEQ ID NO: 17649 - DNA, 266 bp, Zea mays
  Clone ID: LIB84-013-Q1-E1-B4
accaaacgtccgcccacgcgtctgcggacgcgtggggagcgcatgatgagctgactgctgtgaatattttaccttctgcgtctgggacacaacaacaacatcgtcgacaagcaagattatgccttgttttgtagtattcctcatgagtcgctttgtttaggaccaatctagtagctggtgttgaacagcagcacattacagaacatatgatcgtcgagtgaccttcatacacgcgtgtaactctcgctctctctctcgctctcagc

SEQ ID NO: 17650 - DNA, 341 bp, Zea mays
  Clone ID: LIB84-013-Q1-E1-B7
aacacgcgtccgcagcagaccagatcatcgcggtgcatgtgcgaccaatctttgagcaagtctacagccaattggcccaccaacggacactccccaccacgaccgcatcagatggcaccagtatccgtgtgatcatgcatgtaattaactcggttctgcttagctacaagtgattgcagctatgcaactgtgggaagtatggcctatttgatatcttgtatagagaaattttgaatggcaaatagagcacaacccacgagagtatacttggaagagggtggaggttactctctagtgtaaattttgcctttgaaattaaaatatttgtagtaattgggcat

SEQ ID NO: 17651 - DNA, 124 bp, Zea mays
  Clone ID: LIB84-013-Q1-E1-B9
tggcgcgcgctgctcccctgcgttcttccctgcaactttcaagcttcccgcgcgcgccctcctgctccctggtcgtcgcgccatgccggtcggagctcgctcggctgcagtctccttctccctc

SEQ ID NO: 17652 - DNA, 350 bp, Zea mays
  Clone ID: LIB84-013-Q1-E1-C11
cgtccgagctccacaacgaagtgcgagcgacccacgtccacacgacacgaaccagcaccaccagccagcagccgcaccacgcacccagcgcaaagcgatggcgtcgctcaccatgatggcgtccttcgccgccgtggcggtggccgcgccctcgcgccgcggcaccttcgcacgtggtcaggtccgccaaggtcgaccgctggcaggagcccgccacgctagcagcaaccgaggccaggcccgccgccgacggacgccgcgccgtcatgctcgcgggtgctgccgcgggcgtggcaaccatctgcggggccggcgccgccatgggggggcccaagaacgggacgcccgag

SEQ ID NO: 17653 - DNA, 318 bp, Zea mays
  Clone ID: LIB84-013-Q1-E1-C12
acggtacagcggaacagaggtgcgacgtactacgacgacgacgcacgcgccacacatggcatcgcagctctccgccgccgtgccccggttccacggcctccggggctacgccgcgcccaggtccgcggtggcagcgctgccgtccgtgagggtgggcaggaagacgtcgtcgtcgcagggcatccgctggcaacacatcggctctgccaccaacctgatcatggtgatcacgaccacgctgatgccgttcgcggggcggttcgggctggcgccgtccgcgaaccgcaacgccacggcggggcctaaacctggaggcgc

SEQ ID NO: 17654 - DNA, 401 bp, Zea mays
  Clone ID: LIB84-013-Q1-E1-C2
gaggcggtcaacaccgcctgtcatgcaatcaaccgtctctatcttcataagatctacagaaagactgcttatgagcttctcactggaaattaagaactaccttgtgaagccataaagaaacttgcaataggtgaagtgagacctcaagaaaaggatgatgaggaaggaactttctggatgaccaataaggttgttgatgtaggtgcaaaggtggtgagtgacaaagtctccacccaagcaaacccatcaacctcaagtcatccaagccatgaagaaaatcatcaaaggatgccaacagtggtagaagatgaacacaaaagcattgacggtgaagtgtctcttgatcaagtgaattatgacgaggagcaaatccaaagacaaccataagtgcctcatccaag

SEQ ID NO: 17655 - DNA, 227 bp, Zea mays
  Clone ID: LIB84-013-Q1-E1-C4
acgtggcgtccggccggtctcttgcacagataccttgatctacgacgtacgtacgtatgtatcatgattattcgatcgccaacgtcctgacgacgatggagtctctctcgtctggggccatcactggaccttccttcaaggtagcgcccgcacgcacactggacaactggaggtcattcatcatgagtgtgtctcgacgaaaggccactggtagagcgaccttggac

SEQ ID NO: 17656 - DNA, 427 bp, Zea mays
  Clone ID: LIB84-013-Q1-E1-C5
aggacgcgtgggcggacgcgtgggcggacgcgtgggtttttttttttttttttttttttttacggtcgcatacaaccacggtcttaagcttcgtctgcaccaacgcatgcatagatcgatcgaactcacgggtcaggctgaacaaaaatacagtcgtagctaggaataatcgacggatgagttcagagcgagaggccggagtcgtcgtcctcgtcgagcgtggaggtgtagacggtgtagagggaccagatgaggccgaagacgcccagcaggatccaccccagcaggttgttgctgagccccaggctgagcccggtgccctccgtcgacatccgctcgtccaccagcgccagcgcgggcgacgtggtcaccgcgctggtggccacggccagaagctaacaacaagcgccgttgttgccgtcccgcc

SEQ ID NO: 17657 - DNA, 295 bp, Zea mays
  Clone ID: LIB84-013-Q1-E1-C6
caacaatccagatccatacaccccgcttgtgatgagcatttcacgtcagtatctgactgatagagctaaacatgatgaaacagcagctgagtggacaatgagatttgcaagatagaggattctgtttgcatctaagcacgattgaccttgtaaaaaaatcttaatgtggcctgacgcctgaaatggtgaatgttggcaaaggagccatcagccatgtattatttgatgtgagttgtgacataaaggtgtactttatgcttgagtgttctttaatcgctgcttttaggtggagaat

SEQ ID NO: 17658 - DNA, 431 bp, Zea mays
  Clone ID: LIB84-013-Q1-E1-C7
accacgcgtccggcctcaagctgggattggcccgtcggcagaacaagtgcacgcgggaccgggcaacatttcccgctgcagccaacaagcagagggggcgacgatatatagccacgggcggccgttgctggatccggcatcttcctcgatcggcaagacgataggatggggttccacctgctggcgttcgtggcggcgaggggcctcatgcaggcgttcaacctgtcggcgccgctcagcctccggctgccgctcgcgcgccacctgccggaggccctcgccgtcctgtacggcgtgctcgccgcgcaagccgcgtggctcaacggcgccctggcgcgcggcgccgcctggagccacagcgggagccggggcggcgtccacgagtacgtccggcacgccatgctcagcgtctacgactgagaccaacggcg

SEQ ID NO: 17659 - DNA, 379 bp, Zea mays
  Clone ID: LIB84-013-Q1-E1-C8
cagcccttgttcatcaacaaaccacatggccgcgctcggtcctgcttctgttacctccacgggcttggcgctgcacacccctgcgattcctcatcgtcggcgtcgccacgggaatgcagtggcctgtgcgtcgtcgtcgccgtcgtcgtctcaacaccagcgaagccttaatggcttggcgatgagttcttcaggcacgaacaatgccttgcccatcaaaggaactaccactacacgggttcctgcagtcggtcgttcggcccctgcgaatccgtcgccgtcaggagggaacaagctcccagtgcccaggattcctctgtgggtcaagtgggtggctggcgccgtcatatttgcagtgcccatgtccaggaggttcaga

SEQ ID NO: 17660 - DNA, 371 bp, Zea mays
  Clone ID: LIB84-013-Q1-E1-D10
acgcatattgatggccagtatgctgtatttgggaaggtcactaaaggtgacgatacattgagtaagctagagaggcttccaacccggagagaaggcatttttgtaatgccgatcgagcgtatcaacatcctatcaacttactattatgatattgatctagagagctgtgaagcagaaaaatctattctccggaggagactttctgaatcagcatcagaagttgagcgatggagaagaaaatgctttgcgtaatggcggaataacgactgcatattccgtttcctgaggctggatatggacgacggtgtggaaatgtgtatgcccgtgttcttatcctatcactgtaatacttgagtagatgttagatgggt

SEQ ID NO: 17661 - DNA, 207 bp, Zea mays
  Clone ID: LIB84-013-Q1-E1-D11
aggacgagtgggcggacgcgtgggatctattcctggtttgattatagactcgaaactgtgtggtcatctttaagtgatgcagtgttactgttttagcagtaaccttacgactaatggggagctattattgtttcattcccatcgtcgtcttcagaattcacatcgcgtgtgcttgcctgtctggttgcgtgccgcgtggttccctgg

SEQ ID NO: 17662 - DNA, 334 bp, Zea mays
  Clone ID: LIB84-013-Q1-E1-D4
aaatcaatgggaagacagctctgattgctcatttccagaactctagtttgatgaatgaggacaaacgttgccgccccatactcttccactcagatggtcctaatgcatgagatcaggaacctttccctatgggtacaaacatccgagccaggtctgggagatcgcggacttcctctggtgaagaaaatcaccatgatatccagacagtcttgaccaacggtgacacttcttccaatggagctgagacttcaggtcccaccatggacactgagtagctgaactgcagcttgttgcgttgctgaccacaaagggccaaactataactttttgcaaa

SEQ ID NO: 17663 - DNA, 415 bp, Zea mays
  Clone ID: LIB84-013-Q1-E1-D5
gagcacctgctccttggactgcttcgtgagggtgaacgtgtggcggctcgtgtgcttgagagtctcggagctgaccccagcaatatccgtacacaagttattcgaatgattggtgagaccacagaagctgttggtgctggatttggcggcggcagcagtggtaataagatgccaactcttgacgagtatggaactaatttaacaggattagcagaggagggaaaattagatcctgttgttggaaggcagccacaaattgagcgtgtggtacaaattttacgcagacgaaccaagaacaatccctgcctgattggagagcctgctgttggaaaaactgcaattgctgaaggacttgctcagcgcatttctacaggcgatgtacctgaaacaatagaagggaagaaggtcataaccc

SEQ ID NO: 17664 - DNA, 426 bp, Zea mays
  Clone ID: LIB84-013-Q1-E1-D6
gtgagaacaatcatatatatattgttgcttaaagagaagagaagatcgacaagagattggcggtaatggactcctcggagctgcacatactggccttgcagagggtgaagcaggtggagccggagaacgcgagcaagatcctcggctgcatcctcctggaggaacccgacaaccaggatatgctgcagctcgcctacggcaacgacgccgaggtgcacgccaagatcagccacgccaaggccatgctggacgccatcgtcgcgtgctgctcctcctcgccggccttcggctaccactactggccgccggtgcccaataaggcgcaggcagaggagtacgcgttgcagccgcagcactacagtggcggagggtgctactacgcctctgagaacgcgctcatctacaatggcggggggccgccgaggt

SEQ ID NO: 17665 - DNA, 428 bp, Zea mays
  Clone ID: LIB84-013-Q1-E1-D7
cttttgcaccacaaggtcgaggatgtcttgcaactgcggatcaagctgcggctgcggctcaagctgcaagtgcggcaagaagtaccctgacctggaggagacgagcaccgccgcgcaggccaccgtcgtcctcggcgtggccccggagaagaaggccgcgcccgagttcgtcgaggccgcggcggagtccggcgaggccgcccacggctgcagctgcggtggcaactgcaagtgcgacccctgcaactgctgatcacatcgatcgacgaccatggatatgattattatctatctagcttgtggtggtggttgaacaataataagcgaggccgagctggctgccatacataggtattgtgtggtgtgtgtgagagagagagaaacagagttcttcagtttgctatctctctctgcatgtttggcgtcag

SEQ ID NO: 17666 - DNA, 359 bp, Zea mays
  Clone ID: LIB84-013-Q1-E1-E1
ggtggaggcaaacctacatgggaggctgcttggcgagctgcttttgaaagatttcagtataaaaaatcacctcatatcagtttagagactcccacaagttcacttataggtagttctgtgcctgagaaagctagcaaaggtacagcaattacaactgtgccagctagcaaaaaagttggtaaaactgtggcgccagcacatcctgctgtaaccctacactctccaacttctgattttccttttggtagttctacatttaatctgcaacgaggcactcatctggattttagccaggcagtatcagcatttgcgtataattcacacatgagacatccgtctcctggtgttgccccctggta

SEQ ID NO: 17667 - DNA, 377 bp, Zea mays
  Clone ID: LIB84-013-Q1-E1-E11
agccctacgtcaggtgcccaattctccattttcgggcccttctccagcgacgagcacccgccagaggattatggattggctggggcagaaacgcgcggagatgctgatgcaggtgctgctggtggcgtctgcggtggtggcgttcctggtgggctacgtgcgcgcggacttccagctcatgctgctcgtctacgccggcggcgtcgtgctcacggctctggtcaccgtccccaactggcctttctacaaccgtaacccgctcaagtggctcgacgctgccgaagccgagcgccacccgcggccccaggtcagccccgcccccgcggcatggggtaagaagaggtccgggaagaacaagtagttgggcgatgtgtgtg

SEQ ID NO: 17668 - DNA, 402 bp, Zea mays
  Clone ID: LIB84-013-Q1-E1-E2
gcccgggaggttacttcgctgcctgaggagtccccggcaccggaggtcttgctaccggctggcggcttcttcttccgttcctccccaagtcctcttcccggaggaatcatgatcgtctgcgtcgccgttgtcggccaccagaacaatccgctgtacctgcagagcttcaccgaggcggacgacgccctcaagctccaccacatcgtccactgctctctcgacgtcatcgacgagcgagtgagcaatcctaagaggagtgcacctacattgaatgagacatttttgggtcttctatacccaactgagaactacaaagtgtatggctatttgacaaacacaaaggtcacatttatcatgggcacgacggatcctgatgtcaaagatgcagaatgccgaaatttt

SEQ ID NO: 17669 - DNA, 360 bp, Zea mays
  Clone ID: LIB84-013-Q1-E1-E3
agctcatctggtcttccctccagccctcgacggtggtcatggccgccgccgccgccactttcggcttcctccatcctccaatccggaaacctgcagtcccaccactgtacattctccggcttcccaccaaaccccactccaaaacgcaccctcgttctccccccctcctcttcctcctcctgggccgccgccggggaggccccatcgccgccttccccaacaccacatcttcatccacgaatgcccctgcctcgcccacctacgacgtccgggaggcataggccgccgtcgcggatctcctccgcgagggcggcgcctccgcggacgacgccgcctccatcgccgcgcgcgcgccggtct

SEQ ID NO: 17670 - DNA, 382 bp, Zea mays
  Clone ID: LIB84-013-Q1-E1-E4
atctgacccgcttttctccatctccacttggtccctctctcgcatggcggcggcggcatcggcgtcgacgccgcagggggtggcggagcggcggggcatcccggcggcggccttcgtcgaggacgtcgaggcctacctccggcaggccgggctcgacgttaactccgccctcgccttcctccaggaaaggttgcaacagtacaaaatactggagatgaagcttctagcacaacaacgagaccttcaggcaaagattcctgatatagagaagtgtttggatattgtttcaacattacaagctaaaaaggatttgggtgaggcacttataactgattttgaattatccgaggggatatactcctgttggaaaatcgaggatact

SEQ ID NO: 17671 - DNA, 146 bp, Zea mays
  Clone ID: LIB84-013-Q1-E1-E5
atccacgcaatcgtggggagctctagctatctaatgtcaatgatctcatgtatacatatacatgccccacgaaatcgttgttagatttggtggggactacagaggtttggatggggttaaatcactaacaagtcaaaatcttcctc

SEQ ID NO: 17672 - DNA, 371 bp, Zea mays
  Clone ID: LIB84-013-Q1-E1-E6
atcgccttgacgtccaagagccccggtccgatgggtcgtccgccgagcgccggtgctccggcgttccgcttcctcccgtccgaggtggcggagatggaggcgcgcctgctgcagctcaacaacggcatccccacccgcgccgtgctgcagaccctcgcggataagttctccgcttcgcccgagcgcgctggcaaggtggccatccagcccaagcacgtgtggaactggtttcagaacagacggtactcacaccgggccaaaactcccagggccgcgtcgtcaccgccggctaagatgacgccctcgggagctgatcaccagcagcatgccgctaacgcctccgccttcagggctgctcagctctcttcggt

SEQ ID NO: 17673 - DNA, 420 bp, Zea mays
  Clone ID: LIB84-013-Q1-E1-E7
agacgctccagcagtccagcactcggagctcgcgcgcccgacggcccaccatgatcatccccaagaagaaccgcaatgagatctgcaagtacctcttcaaggagggcgtgctgtatgccaagaaggactacaacctggcgaagcacccacagattgatgtgcccaacctccaggtgatcaagctcatgcagagcttcaagtccaaggagtatgtcagagagaccttctcctggcagtactactactggtacctcaccaacgatggcattgagcacctacgcaactacctgaacctcccgtctgagatcgtgcctgccacgctcaagaagtctgccaggccactgggccgtccatttggctctggccctcctggtgaccgcccaacgggccctggtcgttttgaagacagaccaaggtttg

SEQ ID NO: 17674 - DNA, 391 bp, Zea mays
  Clone ID: LIB84-013-Q1-E1-E8
atgccccagccgaacctgctatcaggacagctgcggccccggctgcgccacccaaggacacagaaaggcagctgtctaaaaaggagttgaaaaagaaggaactagcagaacttgatgcagtattggctgagctgggactctctgcaaattctagcagcactgcacaggatgctgagaagaaaggtaccaaccaaattggtgatgcagagaaaaaggaagatgctcctgctcctcccgagagcaaggcctccaagaagaagaaaaagaaggacaagagttcaaaggagggaaaagaaacacaagaagcacttgatgggtcagaggagactgccagtgcaggacctgatgaagatacttctgctgtggatgtgaaggagcgcttgaagaagat

SEQ ID NO: 17675 - DNA, 367 bp, Zea mays
  Clone ID: LIB84-013-Q1-E1-F1
cccacgcgtccggaatatatttgatctctctcgatctgatctgagctgagccggctggtggcccgggaaggacgaagtgtgtcgccacctataatttgatgatgtttgtgtcatcatgatcggtggctagcagaataagagatgataagcggcaacctcaacaatgaagagctggggggcggcgggtgcaccaaggccgaggggccgggcgcggccggcggcgccggcgccgtcgtcgcaaagagtcccgtgctgtcgagctcccggcactggccgccgtcgacggagtcgaggatcgtgcgcgtgtcgcgggtcttcggcggcaaggaccggcacagcaaggtgaggacggtcaaggggctgcgcg

SEQ ID NO: 17676 - DNA, 340 bp, Zea mays
  Clone ID: LIB84-013-Q1-E1-F10
agagcttccaccgtctccctccgcttccccgtgcggcggtgccgggtcgcgccgtgccatggcgcccgccttctcggtctcgtgcgcgcccggatcctcgcgcccgctggccgccagccccggccccagcgtcgtcgtcgtcgcctcctcccaacttcccgcgtcgtcgcggagcagcgaacgcaggagagcaccaggcctcgcgctcgccgcggtcccgggtgtcggcggtagggatggcggtggcaggtggagagcaggcatctcgtccttccccttcctgccgccgttcttcacagggaagaagggggagaaggacgctgagaatgcgatgaggctc

SEQ ID NO: 17677 - DNA, 374 bp, Zea mays
  Clone ID: LIB84-013-Q1-E1-F11
attccggtctggccttgttggtttcacgcttcatgggtcactttcacattactactaccatatatgcgaggcactgttcccattcaaggattggtgggttgtccctgcaaaggttgcattcgatcagaccatctggtctgcgatctggaacagtatctactttgtggtcttgggtttccttcggttggaatcacctaccactatctacaacgagctcaagtccacattctggcccatgcttaccgctggatggaagttgtggccttttgcgcacttagttacatatggtgtgggtcctgttgagcaaagacttctatgggtcaactgtgtggagcttgtctgggtcacaaaactgtccacttattcaaacgaaa

SEQ ID NO: 17678 - DNA, 376 bp, Zea mays
  Clone ID: LIB84-013-Q1-E1-F2
gacaaacggccgaaatgtcgtacgtgtgatgccaatgctgaaagccattaagcaactgaacgttcatgatgtgccatccatattaccagttgttcttaaaagatttcagtcatgaaaacattgcaagatcatcatatgtgttactttccctgatatcttggtcatggatccatttgtgactaagtctggtgagaagccccatcttaaggtcatgtacgtcgtggctgtacatgtggtcacaaaaaatgtatcattctctgggcactagatatcatatgtcaaaaatacacacggtacaaggttgggaattgaggagtcaaaggtccatgcagttccagtgaaacatcttatgtcagaaggtgcatagatgcctttc

SEQ ID NO: 17679 - DNA, 336 bp, Zea mays
  Clone ID: LIB84-013-Q1-E1-F3
ttttaattttgcatgcacacgttttaattttagtctaataagtgtatatatatatataattaaattgataccggactgtccagacgcagcaacggtttctttctttctttcctttccgaaagccacagataccaacttggatggcatgctacgtgtgcaagcaacggatcagtcacccatggaagcaaacatttattccaagtcgctgtactaaatcaagtcttcatttctgaatcaatagggcggcaagctcccctctctcagccatggacgaaaccaatttccaagctcccaagaagtcccctccgaagaagaacttagggaaactccggcaac

SEQ ID NO: 17680 - DNA, 414 bp, Zea mays
  Clone ID: LIB84-013-Q1-E1-F4
atcgaatctgtcggatatgtatcggaagccagttttggagaaatctgctgacacatctgatgaggagcctgacattgatatcatgaagctgctgaaagatgttgagatcattggtgcccctacatttaaggggcgaaagcaaatcgagaaccgcagagtagttgagttgggtggaaagtccgttaagaagcaccgcacaccattaagtgttgcgaagccagctctgaagaatcagaagaaacgagaacagaagaaaatggaagaggaaaaactacttgggatctttaggaagagggacaaggacaccaaacctcacaagacaaggccagaggaccgaatgcttacggccacagaatggcgctttaggaacggtatactgaacgtcaagcatcttctggcgccaccgaaaccatc

SEQ ID NO: 17681 - DNA, 307 bp, Zea mays
  Clone ID: LIB84-013-Q1-E1-F5
agaagaagttggatggacattgtacacagatcaatgagtcatcagcagcatatggcagtgatgaagaagaggaagaataacctgatgtccgtcctaattcagggagtgatgaggacctaagtgaagaagacaccatggagatcgatgaggagatggaagggtctgtggccgaggactgcaacatgtctgatgacgaatatgacgacctgggcatgcgggacagtttggataaccgctatttatctgatgatggcgttttctgttctggtttaaccaactcgtcaatcggcaatttctttggtggcaa

SEQ ID NO: 17682 - DNA, 297 bp, Zea mays
  Clone ID: LIB84-013-Q1-E1-F6
acgactcgtaggggaatatagacagagccctgtccaataccatcttggacagaccagctcagtatcagacttccagcttcgtgacatcattcctcatcgcaacgtgatatctccgtcggtcggtaaaggagctcttaatatcgatgctgtgtacagtactacagtcgacaccgatgtgactggacacattaggaccctgaactcgatcatccccatgttatcgattgcacagttgatttgagtacgatgccacatgtgcatgataacctagatgatcacatgacgacacatccacat

SEQ ID NO: 17683 - DNA, 389 bp, Zea mays
  Clone ID: LIB84-013-Q1-E1-F9
agacggcaagaacgagcaccagttctacctgtggttcgacccggccgccgacttccacacctacaccatcatctggaatcacaagaacgtcatcttcaaagtggacgacctcttcgtgcggtgcttcaagcggtacccggacctggcgtacccgggcgggaagcccatgtctgtgcacaccacgctgtgggacggcagctactgggccacgcagcacgggaaagtgaacgtggactggtccgccgcgcccttcgccgtctcctaccgcggctactccgccgacgcctgcgtgcccgaccgcgacggccgcccgctctcctgccccgccggcaccgaaccgctggatgagccgccagctcgaacccgccgagtggtgcaccgtcgcctgg

SEQ ID NO: 17684 - DNA, 284 bp, Zea mays
  Clone ID: LIB84-013-Q1-E1-G10
atctccaactctcagtggaaacactcgagtcactcatcaagctaacgaaggaaggtaccagttcagacaagtatgaacatgaaggttccacgtctgcgtttgggggaaggggtaaccgggctgatgcttccgtactgccagaggttgaagggcccttacaggttgttctgttcgaaggatggatgcctggatttaaacctcttccgcaccaagttgtgaaacaagtggatccacacctggaggtggttaaccacgaaccttgaggcacactctgatgcttggga

SEQ ID NO: 17685 - DNA, 393 bp, Zea mays
  Clone ID: LIB84-013-Q1-E1-G11
aagtagatggaagcaggcggcggcagaggaagcgtccacggccacgaccggcagcagcagcagacagcacagggtgaggatccgccgatctgaccagttacaaggcgcgcgcgagccgggagctctggagggcatggccatgggaaaggagccggtcgaagaggaagaggaagaggtggcgtgccactgctgcgggttcacggaggagtgcacggcgccgtacatcgcgggcgtgcgcgcgcggtatggcgggcggtggatctgcgggctgtgcggggacgcgactggcgaggagctcgggcgcacgtccccgcccatctccgccaccgaggcgctggaccagcacgcccgcgtctgtcgcggggcctccagccgccggcgtcacccccgggc

SEQ ID NO: 17686 - DNA, 301 bp, Zea mays
  Clone ID: LIB84-013-Q1-E1-G12
aggacgcgtggggcgactacggctgggacaccgcggggctgtcggcggacccggagacgttcgccaagaaccgggagctggaggtgatccactcccgctgggccatgctgggcgcgctcggctgcgtcttcccggagctgctcgcccgcaacggcgtcaagttcggcgaggccgtgtggttcaaggccggctcccagatcttcagcgagggtggactggactacctcgggaacccgagcctcatccacgcgcagagcatcctcgccatctgggcctgccaagtcgtgcccatgggcgccgt

SEQ ID NO: 17687 - DNA, 376 bp, Zea mays
  Clone ID: LIB84-013-Q1-E1-G2
gggtcgagtccgcgtccgcccacacgtccgcccacgcgtccgtagatctgcagcaacccctcccagaacctctgactttgcttcgcatcgcttcgtttccaagaggagaatgtttctctcccttgcccagtcgcctgcctgcgccgtcgtctccttcccatggaggtcctcgtcgcaactcatcccacgggtctcctcgcgctgcaccctcgcatgccacgcagcggtgcccaaagtgcctctccccatcgcctcgccggcgtcactcggggacgaccctagcaagtgggaccccgccgagtgcgacgctctcctccgcgggggggagcaagtcgcctccgtgctgcaggagatggtcacgctgatggatgacatg

SEQ ID NO: 17688 - DNA, 412 bp, Zea mays
  Clone ID: LIB84-013-Q1-E1-G3
agcaaaaaagctgacagagagtaaatcaatgcaatcgatgtgtgaaacctatgcagctgtgtcatatatttgtaagggtgatgcagagtcgtcttcacaggcactagaactggttggtcctgcctatataacaatggactcatttgttggtgtgcgagagaaaacctgtatcatttttgtttatggactattacttatgagacagcataatccgcaggaagcacggaaccgccttgcaagtggtttgaaaatagcgcaccaacagttgggtaacatccagttagtttctcagtatttgacaatactgggcacattggcgcttcagctacatgacgcagcacaggctaaagagatcctgaagtcctcgttgaacttagctaagaccctaatttatattccaacccaaatctgg

SEQ ID NO: 17689 - DNA, 369 bp, Zea mays
  Clone ID: LIB84-013-Q1-E1-G4
atcaaaattgttccccaaaaaagatgtagtgaacacattgaagaagatgtttatagggcaagcagtctatggaccaattattaactcagttttcttctcatacaatgcacgattacaacgcgacactgttgctgagattattgcaagattgaagagggatctaattcccaccatcaaaagcgggcttttatactggccaacttgtgatttcattactttcaagtttgttccagttcatttacagccgctagtgagcaattcattctcatttctgtggaccatctacataacatatatggccagcttaaagaaatcagatgtggacgtggaccccagtacctaagtgttgtcgagtgactcaacatggct

SEQ ID NO: 17690 - DNA, 270 bp, Zea mays
  Clone ID: LIB84-013-Q1-E1-G5
atagttctagatcgcgagcgggcgccctttttttttttttgtttttttttttttttttttttttttttttttttttgttttttttttcccggcagaaaccaggtttcaggctttttttaatataataccgggggaacagtttttccctttccgaccaagtttaacaatacagtagagatggacgacaatgacattgcattcgcgttttcctttgaccacacgagatactaggctaggagacgacctgcaataggtgacaacggaactgaa

SEQ ID NO: 17691 - DNA, 93 bp, Zea mays
  Clone ID: LIB84-013-Q1-E1-G6
accacgcgtccgcccacgcgtccgggttatgtatgtctggttataaccaaccattgcatcactatttttcatttttaatattggtgttacgat

SEQ ID NO: 17692 - DNA, 367 bp, Zea mays
  Clone ID: LIB84-013-Q1-E1-G7
accacgcgtccggcatttccccttccccgcaccgcaccgcacccaacccccgtcggagagagagatggcatcggtggcggagatgcagcccctcgcgccggcggggtaccgccgcgcgccggagatgaaggagaaggtggaggcgtcggtggtggacctggaggccgggaccggggagacgctgtacccggggatctcgcgcggggagagcgccctccgatggggcttcgtccgcaaggtctacggcatcctcgctgcgcagctgctcctcaccagcgccgtctccggcctcaccgttctccaccccaccctcaacgccaggctctccgaatccccgggccttccgctcgtgctccgccgttcctgc

SEQ ID NO: 17693 - DNA, 357 bp, Zea mays
  Clone ID: LIB84-013-Q1-E1-G8
catgaacccaaatttcgaagacatgagctgcgagatgatatacggccaggtgccgcctccgttggaagaggacccggcgtcgaagcaagcttgctacccgagcctctgttccatgtcgacgccgtctgccccggcctgtcccaagcttcagtaggagtaggtccatacatgcatgtgcagagtttgcccgtcggactgggatggaagaagtatcactagtatttttttaatacagaaacgtagcttgtaaacgattagtaaagttacatacaaggttttgttctgagccagtacagaccactctgtaataaagaatacgtttctcagacctttggtatgagagggtacaacgacgcc

SEQ ID NO: 17694 - DNA, 395 bp, Zea mays
  Clone ID: LIB84-013-Q1-E1-H1
cccacgcgtccgcccacgcgtccgtcgacgaacaactgagaagagctgcgcctgcgcctgcgcctgcgggaaagggagaacatggtggggaagaagaggggtgttatctccccgctggaccatctcgctgggctgctggaggtgcgcgtggtgaggggagtggacctcgccatccgcgacctccgatccagcgacccctacgtcgtccttcgcatcggcaaggcgcagaaagtgaagacgcgagtggtcaagaagagcatcaatccggaatggaacgaaaaactcaccctctctattgaagaccctgccgttcctattagactggaagtatttgacaaggacactttcgttgatgatgcaatgggtaacgcggagctggacatccgcccgttagt

SEQ ID NO: 17695 - DNA, 333 bp, Zea mays
  Clone ID: LIB84-013-Q1-E1-H10
ccttcaatgaaatgcggagccccattagcggcaggggggttgctgttccctcagctctctcagcattcaccggtgcaggtgctgaagaacttctcccatgttcgcaatcttcaggtagagctcccctccggagatgttgcagtcgaggagggggttctgctgaagtggcgggctgaatatggcagcacacttcagagctgcgtgatcctgggtggaaccttggttgatcgcaaggccgctggcagtgggcatgagccatcaccgggtgacaagggaagcatgccagaatctttctataccaatggtgggctgaaactccgtgtcgtatggact

SEQ ID NO: 17696 - DNA, 242 bp, Zea mays
  Clone ID: LIB84-013-Q1-E1-H11
agtggcacccacgcatactcttctcgcccccagtccggaccccggaggagccaagccatggtgtccacctcctgctgcctcctccaccattcaaccgcccgcctcggcgcgtcgccgcgcctggccgccgccccgccgcgcagcgcccagctgctcgtctgcaaggtccggaagcaggaagccgccgcggcccagaacgacgtctcgcgccgcgccgcgctcgcgctcctcgccggcgtcac

SEQ ID NO: 17697 - DNA, 393 bp, Zea mays
  Clone ID: LIB84-013-Q1-E1-H3
gctatttaagcaagcatacaaatcttcagtagacgctagtgagtatctagatcgctaccagatgtacaagcttcttaagggtccgtatgacaaggagggagcgtgcattattgttactgcagtatctaacggtgttacttctgagctgtgggcagagaaggtctttggcatgtatacaagttgggcacggaagcaacgttacaaggttggattgattgagaagatattttcaactagtggccatatccaatctgcaacaatggagattgaatcagagtacatgttcggcaccctttctggagaaaaagggatgcatcaaatgatatactcctccattgaaaattccgacattgatcacgcattatcagctagagtcgacaaaattcccctgtt

SEQ ID NO: 17698 - DNA, 370 bp, Zea mays
  Clone ID: LIB84-013-Q1-E1-H4
cgggtcaacccacggatcaagtgagatccgccgcttgggcggacgcatgggccgaggcccatggcgccgagaacgtcagagagagcgatgacatcggcggccgcggggctcgcgcgtggcgccggcccgcactacagacgcgtcaggaagcggccgtggggccggtacgccgcggagatccgcgacccggccaagaagagccgcgtgtggctcggcacgttcgacacgcccgaggacgccgcgcgggcctacgacgccgccgcgcgcgagtaccgcggcgccaacgccaagaccaacttctccttcccttcgtgcctgccgctcgccgccgcggacgtggccggcggctgccgggacgggaacagcagca

SEQ ID NO: 17699 - DNA, 169 bp, Zea mays
  Clone ID: LIB84-013-Q1-E1-H5
acgaggatgctgcggctgcgctggcgtgccgtcctccccccactcccactccctccgctgcctggcttgcttcgccgcctgcctccgcaccggcgctccctctcgtcctcttccggatctatcccgcttccaccgccggtgattgaggcttcctacaagtttgggccct

SEQ ID NO: 17700 - DNA, 347 bp, Zea mays
  Clone ID: LIB84-013-Q1-E1-H6
accaccatcgaccttcaagtctcgctacgtagcagtgcaataaaaaaagcagccgcaatggcgagcagcaccatggccctctcctccacggccttcgccggcaaggccgtgaacgtgccgtcgtcgtccgccttcggcgaggcccgcgtgacgatgcgcaagacggcggggaaggccaagccggcggcggcgtccgggagcccgtggtacggccccgaccgcgtgctgtacctgggcccactgtccggcgagccgccgagctacctgacgggcgagttcccgggcgactacggctgggacaccgccgggctgttagcggacgcggagaagttcgccaagaaccgggg

SEQ ID NO: 17701 - DNA, 377 bp, Zea mays
  Clone ID: LIB84-013-Q1-E1-H7
atccggctacctgacgggcgagttcccgggcgactacggctgggacaccgcggggctgtcggcggacccggagacgttcgccaagaaccgggagctggacgtgatccactcccgctgggccatgctgggcgcgctcggctgcgtcttccccgagctgctcgcccgcaacggcgtcaagttcggcgaggccgtgtggttcaaggccggctcccagatcttcagcgagggcgggctggactacctcgggaacccgagcctcatccacgcgcatagcatccttgctatctgggcctgccaggtcgtgctcatgggcgccgttgagggctatcgcatcgccggcggcccgctccggtgatgtcgtcgactccgctctaacc

SEQ ID NO: 17702 - DNA, 421 bp, Zea mays
  Clone ID: LIB84-013-Q1-E1-H9
aaagaagcagctccacatcgagaaaggagacgacgacttcatccccggacggggtggtggctacgatgacccggacgagtacgacttcatgtgatttggctggaaggaagagtaagtagggttaataggtttccgtcttgtatacatttggcaagcagagaacatatcacgagagtttgcggcatactatactatggcatggaacatgcgttatctgtttgaggatgaattttgactctgcaggacaagaagagcacaagtgcttacttaattgttattgaatctctgtggtatttttttagcatacattgcattttcatttattttttgtcaactgtactgtaatactgtcgtcggtatgtactgtaatattgtcgccggtaccgggcgtgaaggtatgtcacacccgggttttggggca

SEQ ID NO: 17703 - DNA, 368 bp, Zea mays
  Clone ID: LIB84-014-Q1-E1-A1
accacgcgtccgcccacgcgtccgcccacgcgtccgcccacgcgtccggtcgaggtacaaggtggtgaagttcgaccttagcaagacgattcagtccgagaagttcgaagataggcgtacctggggcatcttcgttgaaggtcggaacgcggtttcgattttggtggccattaacaatgtatccacattcattcatggccgtaatttagattggcgatgtgtggatacatttgatgagcaatacatgaaagataagatccgtagtttgatcacagataggcagcgactatcacagatacacaatgaagtacaaagtattcctggagatgacatgaaagcattttttgatgtgattaatagcattcgca

SEQ ID NO: 17704 - DNA, 333 bp, Zea mays
  Clone ID: LIB84-014-Q1-E1-A11
actaggtcaagatcgcgagcggatgccctttcttttttttatttctgattgatgcaataaaattttaataattgtaggcctgagcgacacgtcaagacaagtttggagacctggacatagaatgcattttgagagacgagttcacacgtttaaggacgtccgaatgatcaacaaacctgacaatctcagataggccactggaatcggtgtaaatcctttgaactaagccctcgtatgtagctgtcgtgtatccacacgagctcaccatgagcaagctatacaacatgcaacatcacgtttaccaaacaatacttcacgaaactagttgttgca

SEQ ID NO: 17705 - DNA, 400 bp, Zea mays
  Clone ID: LIB84-014-Q1-E1-A12
aggaaattgctgaagatgatgctgtcccactcgtggtctaatattcggccattgtgctctggaggtgttgttcccaatcgagacatcctacgatggaatgtgacacactgggattcacgaccttgtatctcctgaatgagttccaaagccagaggtcttagacatcgtgtataacgacacattatgttttcaccgtgctattgaacatcatgatggcatcatgcatcaaacaggaatgtaagccccagacagtgttcatcaaaggagatcatccagattatcaaatacttgttgcatctgctgtcagctgtcgcctaacttgtctatatactagggtcgatccatgacattacatgaggttacgcatcggggatcgccttaaaatgggtgaacgttaact

SEQ ID NO: 17706 - DNA, 351 bp, Zea mays
  Clone ID: LIB84-014-Q1-E1-A2
cccacacgtccggtcccagtccactacaaaggtgttggagtcctggtattcttgctggtgtgcatcctcgctttcagccaccaagtttgttttactctaaagctgaatgccaacctcttgcctgtggtgaccagacccaaccgtttttcacctccccgtggacaaggtttcccacaagtattcttggtcgtgtactacttgttccatgcgcggcaaagaactcctaccaacaaggagtgaagattcaagctgaagtggtgactgaagatgaatctactccagtggctgctgatcaagtgtcggagccatctaactggggtttaatacatggatcgagtagctcttcactgg

SEQ ID NO: 17707 - DNA, 353 bp, Zea mays
  Clone ID: LIB84-014-Q1-E1-A5
aacacacgttctgctcacttcgagaggattcctcgcctctcctccccgcgcgctgcctccgctccgctcatgtcgtccgcgccgagcaccacggcgtcgaccatcgcagcctctatccacacgccgttctcctcgggtcgccgcggggcccgccttccggccgcgctccgcctctcgctcgctcatctccggtcggccggatgccgcgcggcgccaggtcgcctcgctcgccctcgcgcgcgcgttcggtgcggcgctgctgccacgttcattgggcaaggccagttccccgcggaggtgatggagtcggagctgcccgtgctcgtggacttcgtctccgactggtgccggcc

SEQ ID NO: 17708 - DNA, 415 bp, Zea mays
  Clone ID: LIB84-014-Q1-E1-A6
tgcttgatccacaggaaagaggctacattcttgaccaagttactgctgcaaaagaagaattgagggcaaagcggaaaaaggagctgaagaaagacagtgcgtccaagataaaatctcttgtagatgagggaaaatatgaagagcagtttgaacgatcggatggatttcagcagcaattaataattaaagtacgtgaaattttgaccgacaaagaatggcgtaggagaaaaatgcaaatgaggatatcagaggaagaaggaagacttaagaaggatgaggaggaaacaaaagagatgtggaagaggaagagagagcatgaagagaagtgggaggagaccagagacaagcgggtctccagctggagggatttcatgaagacaggaaagaaaggacggaaaagtgaaatcaaatcccc

SEQ ID NO: 17709 - DNA, 417 bp, Zea mays
  Clone ID: LIB84-014-Q1-E1-A9
ggatggcggtgagctgaatggtgaggcaggttcagtggtgggaactgcagatggaattgttactgaaacatccaaggtcccattcctgatgctcggtcttgacctgccacctccacctcttttcaaagacgccatggagaaaaatatcattccacaggtaccattgtttaacatactgaagaagttcgatggtgagacagttacagaggttgtccgaccttccattgccccaatgaggtaccgactcactacactgccgaagtatctgatccttcatatgcgaaggtttaccaaaaataacttttttgtcgagaaaaaccctactcgagttaattttcctgtgaagaacttggagttgaaggactacattccattacctaagccgacagagaatcataaactacgttcaaagtatga

SEQ ID NO: 17710 - DNA, 227 bp, Zea mays
  Clone ID: LIB84-014-Q1-E1-B1
cgtccgcggacacgtggggcgcctgctggaccatctggcgcagatctatgccgccggcgggctggtggccggcgcccgcgtcgccccgcccgccggcgtccaaggccgccgtccatgccatgcccattgtctcggtcgccgccactgtcggcgcagtgcgccgtctgcacggaggccttccagctgggcgtcctaggccagcgaaatgccctgcgcacacatctaat

SEQ ID NO: 17711 - DNA, 410 bp, Zea mays
  Clone ID: LIB84-014-Q1-E1-B10
cgccggccgactcgagcagcgccccagcagcctctgctccgctgcctctggcgaccgccggagcccgaggaggaggaggagggaagatctcgctcgatccaaggaggtgagtacaagatggtgagctcctcgtcgccggtggtcaacgtgtacccgctcgccaactacacgttcggcaccaaggagcccaagatggagaaggacacctccgtcgccgaccgcctcgcccgtatgaaggtcaactacatgaaagaaggaatgcgtacaagtgttgaagcaatcctattggtgcaagagcacaaccatcctcacatactgctcctgcaaatcggtaatacattctgcaaacttcctggtggacggttgaagcctggagaaaatgaaatcgagggttttgaaaagaaattatg

SEQ ID NO: 17712 - DNA, 380 bp, Zea mays
  Clone ID: LIB84-014-Q1-E1-B11
agcaacaatagcagcaagagtaagaataaaggatctgggtttgttgttattggtcaggatcgtgtcgagcccttgcaagcacttcaaaattctgggcaagaggtctgtgtgaacatagacaaagaaagggaaaagcgaagagtctctgagaactggaggcggaagaagcacgaagaaaagaaacgtacacgagagcagaagcgaaaggacaagagaaaagctaaagagatggcttgatgacacatgggatagctaggggccttcaaggggtttacggaagctctttaagctcgcgtcaatcctttcagaaaggaacggaatgcattcatcaatgtttttgctgtaatacaatgcgtgcgctaagttagcgcttgccttta

SEQ ID NO: 17713 - DNA, 284 bp, Zea mays
  Clone ID: LIB84-014-Q1-E1-B12
aaggacgcgtgggcggacgcgtggggggtgccagccacgctgctgctcatgttcgagcatccgattcacgaatccgccgacaccgtaaagacggcgctgtcccgagcgctggtgtactaccaccctttcgccggtcgcatcgctgccggagccgacgcccacgccgacggcggcaagctccacatctggtgcaaccgcgagggcgccacattcgtgtctgcgcacgcaagctgcggggtgcaggaagtcatagggctggatcgctcgggagcaccgacgacctt

SEQ ID NO: 17714 - DNA, 339 bp, Zea mays
  Clone ID: LIB84-014-Q1-E1-B2
accacacgtccgcgcacgacaccaggagtgagccgagtttggtttggccgggttattcagtttattctttattatgcaattctagtttttgagtctattttgtagtcctcgacttcccaatgtgtgggttgcaggattgggtccgatcagtggagaattcatcatgatgacatgttgcgaggagatggaggcaggtcagtcttctgtcagatccggcggttcattgactttgtcgattggacatggattggtggtttcaggctcaaatgtctccgggtgtggtaccatcagaaccttcgattgagtcttactttaagggcagacaagaaagggtccttg

SEQ ID NO: 17715 - DNA, 347 bp, Zea mays
  Clone ID: LIB84-014-Q1-E1-B3
cagagaggagagaactagagaaagatccccacccccaggcgacgcgaccggcgagccccgaaaccctaggtcgcgcgacccgggcagcgcgcttctgcgtgactgcgtgtctttcggggaggggacagcgttaggacgcgacgaggttagcgaggccgtctggccgactataagcggaagaatctcctccgaagccttcctagagctgtgaagagcgcgtggatctcctggatttgcatactcgaggggagctgagacaaggtcatggcagaagtgtcggtgtgatgtgtgcgcttctttgtcgcattagggttcgctggagattggaaagctgctgcacacatgat

SEQ ID NO: 17716 - DNA, 419 bp, Zea mays
  Clone ID: LIB84-014-Q1-E1-B4
cttgcactgatagcttgctccaggacgtacgtacgtacgtagatcgatccatcgatcgctagctagctgacgaccatggcgtccctctcctctgccgccatcaccgccccttccttcacggccgcgcccgctcgcgcagtggtcagcaggaggtccttcaccgtgcgtgcctctctccgcaaggccactgccaccgccgccgtggccgttgccgccagcgtcctgcttgccgggggcggcgccatggcccaggaggtgctgctgggcgcaagcgactgcgggctcgtcttcgagcccagccagttcaccgtcaaggccggcgacaccatcaccttcaagaacaacgccgggttcccgcacaacgtcgtgttccacgaagacgaggtgccgagcggtgtcgaggcctccaagatctcgca

SEQ ID NO: 17717 - DNA, 418 bp, Zea mays
  Clone ID: LIB84-014-Q1-E1-B5
ctttgggtcagagactctgaaatctttgagaaccgtgacatagcagatgagatttcagagcagaagggtgatatactgcaggttgaggaaggctttagagggactcttttgtcatcaagtgtttcagcacagctttgtcagggcataacatttagtgaatgagtttcttccgtgagatatatgggtgcatacctgttggcataagctagttaaggtctctacaaggtacctgattgcttcagagggtagtcaatcatgtcagttctagcagccctcgcgaaaagttgtctatgcttctctccatgctgtcacactaaggatgtcaaatgtatcctcgcttgatgaaaaccgaagaaggctcttccttcttccctaatgtaatcgtgacttaggtataccactgggctacggggctgtg

SEQ ID NO: 17718 - DNA, 416 bp, Zea mays
  Clone ID: LIB84-014-Q1-E1-B6
catctcaacaatccgaagatctccgtaccgttgaccaacaccaaccggccggcgcacgctcctcctgcgcccaccatggccggcagcgacgccgaccgcgagaagagctgctgctgcagctgctgcacgccgctcatctccctgggcgtcgtcgtgctcatgtactgggccatcttccagccgcaccagatacgcgccagggtggactacgcggagctgtccagcctcagcgtctccaacgcttcatccggctcctccccctcccccgtcacggtgtcctaccacgtggccgtgaacctgagcctctacaagcccagcaagcgcgtcggcatctactacgacaccctggacgccgcgctccggtaccgcggcgccgtgctgagcccggccgccagcgcggcgtcgcccgccgagtt

SEQ ID NO: 17719 - DNA, 407 bp, Zea mays
  Clone ID: LIB84-014-Q1-E1-B7
aatgtatgcaagatgaaaccgttctcaagaattttcaagacgaaggtgaatacatcatacacaagagaggggtaaagttcagttatacaagacttcttcatctagtttctttaagtacaacagaccacttccattccttcctcctacaccaaaagccatgtttcccacgtacgacgactgcccaactcgccagcagcgatgtgcaagcacaggtgcagcagctagtagtagccgatgtccttgtcgtcgacgacgaggtctccgttgatgagctcgcggtaggccgcgacgggccagatgaaccccctggggaggaggcgggtggcgagctcgacgtcgatgatgatctccctcatggcgggcttcttctcgccgctgacggcgatgaggtagctcctgccgagcca

SEQ ID NO: 17720 - DNA, 416 bp, Zea mays
  Clone ID: LIB84-014-Q1-E1-B8
aacaaacgcaacctgcagccatggcacagaagctcgcgccaccgacggcggcggccgtcgtcgtcctgctggcgctcgccttgtcggccgccgcgcagaactgcgggtgcgcgtcgggcctgtgctgcagccggttccggtactgcgggacgggcgaggactactgcggcgccgggtgccagtcgggcccctgcgacgtgccggagaccaacaacgcgtccgtggccagcatcgtgacgccggccttcttcgacgcgctcctcgcgcaggccgccgcctcgtgcgaggccaacggcttctacacccgcgacgccttcctcgccgccgccggctactacccggcgttcggccgcaccggcaccgtcgacgactccaagcgcgagatcgccgccttcttcgggaacgccaaccacgag

SEQ ID NO: 17721 - DNA, 247 bp, Zea mays
  Clone ID: LIB84-014-Q1-E1-B9
aaacatctgttgcaacataagaatatggttgacactacacgtctacaagggctggtctagaatgccgtgctattgtcattattttttaagtttatcaagagctatctgaacgcgttccatttggattgaggtgtattgaagtggatggatgaggattttgattagtagtggatttattccctcttaaaaaaaaaaagggggagtaactaagagaatgtgcctcagaaaaaaagggggggccgcccta

SEQ ID NO: 17722 - DNA, 215 bp, Zea mays
  Clone ID: LIB84-014-Q1-E1-C1
cccacacgtgcgtctattaggaggagtcaacttacggggcatctagacactttcgcaataagggtggtagccacataactacagcgattagccgttgcgtggtacgctcttgtacgacactgtgggacgcacgcacatgtggaggatatccattgtatcatcacaacataatatggtaccctccgatcatacagcggtgtccagttctgagggca

SEQ ID NO: 17723 - DNA, 417 bp, Zea mays
  Clone ID: LIB84-014-Q1-E1-C10
cccacgcgtccgatcgccacccaccccatctccatggcctgcgtctccgtcaacgacgccttcgtgatgcgcgcgtggaaggagagtctggggatcggggacgaggtgctgctcctgtcggacggcaacggcgagctggcgcgcgccatgggcgtcgagctcgacctctccgacaagcccgtggggctcggcgtccggtcccgccgctacgcgctgctcgcggaggacggcgtggtcaaggtgatcaacctcgaggagggcggcgcgttcaccaacagcagcgccgaggacatgctcaacgcgctctgaactcgcgacgccatggttggttcgtctcttccggcaagagttggtttcttttccctgaaaataatcgtgacggcaacggtggcttgtgttactgccgccactgttgtg

SEQ ID NO: 17724 - DNA, 407 bp, Zea mays
  Clone ID: LIB84-014-Q1-E1-C2
gaaatatcaaacctgtatttctactctgtagatattcaagcaaatgttattaaagggtattcattacagaaatcatgtgatctcaattttggtgatgactactgcttcagtacgaaggagttatggtccatcatctttccttctgattctgaaaggattgttatctctgaaacgcgaaatatgaatgaggttgttcatacccaagctaagacaattggtgatcatgatgtgatgtacaagtacttgtcaaagaatttagtttttgttgctactttgtctcctaaagctgctggtgatattggatctgtgctaactgaagaagcttcacttgttgcatatcttattgatgcagtcactggacgcatacttcatcgtgtaactcatcatggtgcacaaggcccctgtac

SEQ ID NO: 17725 - DNA, 114 bp, Zea mays
  Clone ID: LIB84-014-Q1-E1-C3
gtcgacgcctgcgtccgaatacagatacatcgatgttctcctgtttcctgagcatgactggttgcagtggagacctcgaaattaaattatacgatgtgttacaacttaagcaag

SEQ ID NO: 17726 - DNA, 397 bp, Zea mays
  Clone ID: LIB84-014-Q1-E1-C4
ctcacgagccacagcccacagcatgctagctctctagccagtccagtccacgcagcgcagggatggcgtcgttcgccgtggcaacggccccgtcgctagcggccccggcagccaagaggaggcccgccgccggcgtcacgtacgtggagggcatgaacgcctacagcggcctcaaggggctcaacaaggtgaccatgctcggggtgcgcaagaccgccgactactccttcgccaaggtcgtggcgtcgctcagcctcgcgggcacgaagcggagcggcggagcgttcggcgcccacatgagtgacgacggttgcacgacatgagcgagcgcagcgaaaccagcacaaccgccggtggacaagcgtccccatagaacggatcccaggcggaaccccga

SEQ ID NO: 17727 - DNA, 424 bp, Zea mays
  Clone ID: LIB84-014-Q1-E1-C5
agacaacatggccgcctccgcctccaccgtctccggcctcgccggcgcctccctggccagccgcccggcgttctccaccagcttcacgcggggcagccgggtgtcggcgaggaaccccctgatgagcaggaacctggagaggaatggcaggatcacctgcatgacgtttccccgggactggctgcggagggacctgagcgtcatcggcttcgggctcatcggctggatggggccgtccagcgtcccggccatcaacggcaacagcctcacggggctcttcttctccagcatcggccaggagctggcccacttccccacgcccccgcccgtcacctcccagttctggctgtggctagtgacgtggcacctgggcctgttcatcgtgctcaccttcggccagatcggattcaagggcaggaccgag

SEQ ID NO: 17728 - DNA, 411 bp, Zea mays
  Clone ID: LIB84-014-Q1-E1-C6
cttttgacagtcatgaggcggaggtgtttcaggttgaatggaatccaaatttggccactgtattagcttcatctgccgcagacaagagagtgatgatatgggatattaataggattggcgatgagcagtcagaggaagacgcagacgacggaccaccggagctgctgttcgttcatggaggccacacagacaagatatcagagctgtcgtggaatcctagcgagaaatgggccattgccagcgtgtctgaagacaacatcctgcagatatgggagatggcagagagcatatactgtgatgacctctccatgcaggttaactgactcgtgcctcgaagcataaaggtgagttacctgaccaatgatgcaagcgtatctggaggggttatatacctgtatgatttgagagatt

SEQ ID NO: 17729 - DNA, 97 bp, Zea mays
  Clone ID: LIB84-014-Q1-E1-C8
aaagtcactcgtactaacgcgtgtgccgacgcctgggcggacgcgtgggcggccgcgtggggccgaaggcctgatggatcggctggcgccgctggcg

SEQ ID NO: 17730 - DNA, 403 bp, Zea mays
  Clone ID: LIB84-014-Q1-E1-C9
agtaggtcctcttcacccaacactagaccaacatttaatggttccttgtcaacagaacaagtgaaagagaaggggagctgtttgtcagatcttgatatcagggatgttcagatggatgatcgagtgactttgactaggtggtcaaagaaaaatgtaacacggtcgtctaacaagaattcaacaaacataatagagtggagcgaaaagacagtggaatcaaaatcttcgtcctggggctttgccaaagcgaagtgcatttctaagattgatagagaggacacagaaattactgcatgggagaatattgaaaaagcaaaagctgatgcagcaattcagaagttagtgattaagttagagaagaaaaggtcatcttcgcttgataagattttgaacaccctcaaat

SEQ ID NO: 17731 - DNA, 365 bp, Zea mays
  Clone ID: LIB84-014-Q1-E1-D10
gaccacgcgtccgagaggataggcactggagagtccggcttgcaataattgagtacatcccattgctggcgagtcagttaggtgttgggttttttgatgacaagctgggggcactctgcatgcaatggttggaagataatgtcgtctcaatcagagatgctgccgccatcaacttgcatcgccttgcggaagaattcggtccaaagtgggcaatgcatcatagaattcctcaggtgctgaggaagatcagcagtccgtactatttgtaacgcatgacgattctgcaggctatctccttgctatctcccgtcatgggttgcagagattacttgtcaaaaactgcttccagttatcattaattcttc

SEQ ID NO: 17732 - DNA, 234 bp, Zea mays
  Clone ID: LIB84-014-Q1-E1-D12
aggcgcgtccggtccatatggaccaccctgtcggcaatttggtcctccagctccataaccagtgccaccgctgctccgtggatcatctgttcgacccaatccgactccaggataaggtcgccctcgcgcctgctgaagatatgggccacatggcaaatccaacacgctgatcatccttcgttcggcttgtgtccctcccccctgagcacccagcatgcggatcaaggttacggg

SEQ ID NO: 17733 - DNA, 429 bp, Zea mays
  unsure (1)..(429): unsure at all n locations; Clone ID: LIB84-014-Q1-E1-D3
gtcgagnccgcgtccgattggattgcgcaccaatgaagatctttatactggagctctttttctattatttctttctacgctatccttaatagggggttggttacatctacaacccaaatggaagccaagcctttcgtggttcaaaaacgccgaatctcgtctgaatcatcatttgtcaggacttttcggagtaagttctttggcttggacaggacatttagttcatgttgctattcccggatccaggggggagtacgttcgatggaataatttccttaaatgtattaccctatccccagggggttgggtccccttctgacgggtcagtggaatctttatgcccaaaatcctgattccagtaatcaattatttggtaccactcaaggagcgggaactgccattctaacccttcttgggggattcaatcca

SEQ ID NO: 17734 - DNA, 420 bp, Zea mays
  Clone ID: LIB84-014-Q1-E1-D5
cgcatcgtcatcaatcgagcagaagggagggagagagagagagagatgaaggagggcacggcgaactgcatcgacatcctcatcgccatcatcctcccgcctctcggcgtcttcctcaagttcggctgcaaggtcgaattctggctctgcctcctgctcaccttcctcgcctatctccccgggatcatctacgcgatatacgttatcaccaaggactagccagctagcgccgtaaaccgggacaaggtgagagagctagctgatcagccagcggagtaatggagatgaactgctgagatcacttgccctgctgctcaatgtttctgaatgtaaagttcgtagcacgtacgtacgaagtgtgttttggatggagactgaatctcagctgtgctgtgctgtgatgctgctatataacttgtg

SEQ ID NO: 17735 - DNA, 410 bp, Zea mays
  Clone ID: LIB84-014-Q1-E1-D6
accacgcgtccgctggggttgtcttgccacggtctacctgtgatgttgttgttacgatgcaagcacagcgggaagccccgcctgacatgcagtgcaaggataagttcctagtccaaagcgtcgttgcccctgctggtataactgtgaaggatgtcactggggatatgtttacgaaggagtctgggtataagatggaagaggtcaaattgcgagtgacctatgttgctcctccacagccaccctctccagttccagaggaatctgaagaaggttctccacctaaggcttctgaatcagaaaacggagatggaccttctggaggattcaccaaagcactaagagagcgcattgagcctcaagacaaatctacagaggctggagctttggtttccaagttgactgaaaagaag

SEQ ID NO: 17736 - DNA, 417 bp, Zea mays
  Clone ID: LIB84-014-Q1-E1-D7
acaacgacatcacggtggaggcgtggctcaacacgcacggtcccaacgaccgcacgctcgcgcaggggctcaagggtgaccccacgtacctggtggtggagcaggacaagacgctggccacctacgggatcaacgccgtgtgcactcacctcggctgcgtcgtgccgtggaacggcgctgagaacaagttcatctgcccctgccacggatcccagtacaacaaccagggcaaggtggtccgtggaccggcgcctctgtcgctggccctggttcacgccgacgtcgacgacggcaaggtcctcttcgtcccgtgggtggagaccgacttcaggaccggcgaggacccatggtggaaggcatgaggatgatccggaaccagcggtgctcagtgctcacacatgagacctatgtatgcct

SEQ ID NO: 17737 - DNA, 235 bp, Zea mays
  Clone ID: LIB84-014-Q1-E1-D8
aaagacacttgggcaatgctgttcttactagcacacacaagtgaagtttctaatttacccgaaggcggccaatgttaccctgacagtatatgagttcaatcagcagaatgtgccaaatttgcaatcggatcctgagaatattgatggagagaagcagtttctgaaccagtctgcgagagaagcctacagtatactaggttttggcatagaagtcacactcataagacagacattt

SEQ ID NO: 17738 - DNA, 392 bp, Zea mays
  Clone ID: LIB84-014-Q1-E1-E1
ggtcgagcacgcgtccggtttcaagatgatatcatcaaaggatttgtatacaatacaaattactcaagtccagaatgtccgtgctggtgacgttgtcacatttacacttctgagcaggtcaagaaattcgctcactccttccatcaaaagctcctccagtgaaagttctacaacagatgaagagcattataatgttttctcaaagtttattttgacatctgatgtggagttgtctgttcgagatgcaaaattggatcctagtaattggttgcaaatggctgacttaggccttgttgatggacttgaggaaacttccatttgtgtctgctgctttggagcaactgggagagaagacgaaatattggattgattacagaaattatgggggtagt

SEQ ID NO: 17739 - DNA, 332 bp, Zea mays
  Clone ID: LIB84-014-Q1-E1-E10
ccggtgacggtgagtgaacaccagccgtcttggcctgctcctcccctgctgcagccatggcgacctccgcggcgctctcgaccgccgccaaccccacccagctctgccggtcccgcgctgcgctgggcaagccagtgaacgggcttggcctggggatggggcgggagcgcgcaagccagcggagcatcacgtgccaggcggcgagcagcatccccgccgaccgcgtcaccgacatggagaagcggaagctgatgaacctcctcctcctagggcccatatcgctgcccacggtcggcatggtcgtcccctaccgggccttcttcgtccccgcc

SEQ ID NO: 17740 - DNA, 203 bp, Zea mays
  Clone ID: LIB84-014-Q1-E1-E11
acacagacgttctagtaacacatctacagtgttcgcgtctgtgggggttacagcaaggctagtgtcatggcaggttgactgaatctgttacctatattttcgcggttcatgtctttaaaatgacagatcatgttgtctacgtgcttacgtgaagttccgactcaattccactaaattcaactggcacagtccccagttttttg

SEQ ID NO: 17741 - DNA, 394 bp, Zea mays
  Clone ID: LIB84-014-Q1-E1-E12
tgaagccttctgaattgacagaggaacagcggcaacttctttcatctaatgttctctgtcaggaccagctgaaaaagattttacatgacactgatcttgaaagcattgaacagtgctatatggagatgaacacagtagagttcaaccttgagcaagctctgaatacggttctgatgcaaggcattcctttgggcaaggaaaaacggatttcaattgaacgtaattggcctgtggaagtatcatgcatgtacctttacggggacaatttaaggcttcagcaggtcctagcagactatctagcatgcgcccttcaattcacacaaactgctgaaggacctatcgtgctccaggtcaagtcgaagaaggaaaaaattggatctggcatgcagattgc

SEQ ID NO: 17742 - DNA, 171 bp, Zea mays
  Clone ID: LIB84-014-Q1-E1-E2
gggtcgaggccgcgtccggtgagatggcacaagccatggcgtccatgaccggcctctcgcagggcgttctgcccagcaagcgcgccgccaatagggccaaaacgggcgccgtcgtcaaggcgtccgcctaggcgcaagcgcaagcgggccgccgcgccgtgctcgggctgg

SEQ ID NO: 17743 - DNA, 405 bp, Zea mays
  Clone ID: LIB84-014-Q1-E1-E3
aggacacgtgggcggacgcgtgggaagagaacccaaaaccacggcactgatatttgcatcgggtaaaatggtatgtactggagctaagagcgagcagcaatctaagcttgcagcaagaaagtatgctcgtattattcagaaacttgggtttccagctaaattcaaggactttaagattcagaatattgttggctcttgtgatgtagagtttccaattaggcttgagggccttgcctattctcatggtgccttctcaagttacgaaccagaactctttcctgggcttatctatcggatgaaacaaccaaagattgttcttttaatttttgtttcaggcaagattgttttgactggagcaaaagtgagagaggagacctacactgccttcgaaaacatctatcctgt

SEQ ID NO: 17744 - DNA, 420 bp, Zea mays
  Clone ID: LIB84-014-Q1-E1-E4
aggacacgtgggccggaccgggtcatcctggtcgagcaggtggcagccgtggccgcagacggcggcgcctcggcgtctgaagctgcgcggcaggtgtaggggctggtggtgcaagcgcgcggcatggagcacgcctcgtgttacgtgctcgacacctgccgcatgcgctcgtcggccgggttctgcacgcacttctgcctcgcgcgggccaaatgcttcggctaagccgtctagctccagctccgcaacgcctggctcaaacgcctcaccggtcgccgatagccgccgcccgtggcctccgctaccactgaactgacagtattatatgccccaaggaccaaacgcaatgatgatgggtcctcttcgctggcaagaaccacgaagtgaagcagccaaaacagcatccatcagatcttttcg

SEQ ID NO: 17745 - DNA, 149 bp, Zea mays
  Clone ID: LIB84-014-Q1-E1-E6
accacgcgtccgagtcaatccagtaaataggctgtgggcatgtacaaatagagttacctgttaatttgttgttcctaaaatgtatgatacatagactgcatttcagttgggacatataacaccaaagcaattacaatgaagtgtctgtt

SEQ ID NO: 17746 - DNA, 295 bp, Zea mays
  Clone ID: LIB84-014-Q1-E1-E7
atgacatcaaagatcagcacattaaaccttgaacgagttaggcaaatcaagagtcgtctggttgcgatatctggtcgagtacaaaatgtgacggatgagctataacatttactggatgatgaaatggatatggctgaaatgtacttgacagagaagcttactcaacaagaaattagtgacgcttcatctatagctgaggttgatgatccatctcacacagaagaggatagggatgaagattatagaagtgagccataatggaagcaatgatagctttattggttataagcctaat

SEQ ID NO: 17747 - DNA, 417 bp, Zea mays
  Clone ID: LIB84-014-Q1-E1-E8
cccacgcgtccgtttttctaaattaacaagggggaaagggaaagattagcttctccctcccttcccctcccctcccgtacagtctgtcacggagcagcgggcaacggcggccggcaggcaatgcaatgaagaaatgctcggcgttggcctcggcgtccgactgatggtagctgttgcccctgcgcctccagttccagccccaccaggcaaaccgccccttcctctctgctcctctctccgccaacgctcctccggctggtggttctccaacggcgacgcccatggaagagacagcaccaccgccaccacgagcatcagggcgacgatgcggaagtggtggtccgaccccgacggcagccaagaagactacggttcctcgtctctagaggacgacgactaccgttacggttaccacta

SEQ ID NO: 17748 - DNA, 403 bp, Zea mays
  Clone ID: LIB84-014-Q1-E1-E9
aggcgactccaggtttgtcggcgatgctgcgagcgggaggcaggcggctcctcgccccggggctccgtcggctcggcctgagcacaggcgcctccggcgaggcgggtcctgccgcggcggcggcgggggtgagggcgtaccacgagcgggtggtggaccactacaacaacccgcggaacgtaggttccttcgacaaggacgaccccaacgtccgcactgggttggtcagcgcgccagcctgcggggacgtcatgaagctgcagatccgcgtcgacgaaaactccggcaagatcgtcgacgcctgcttcaagacttttggctgcagctccgccataacgtcctcgtccgtcgctactgaatgggtgaacggaaaaccaatggatgaagttttgacaatcaagaa

SEQ ID NO: 17749 - DNA, 414 bp, Zea mays
  Clone ID: LIB84-014-Q1-E1-F11
cccacgcgtccgcccacgcgtccggaacaagaggatctccaagggaaagaagggtggcaagaaaaagaccgtcgaccctttctctaagaaggattggtatgacatcaaggcaccgtcggtgttcagtgtgcgcaacatcgggaagactctcgtatccaggacacagggtaccaggattgcttctgagggtctgaagcacagagtctttgaggtttgcctagctgatcttcagggcgacgaggatcaagcttacaggaaaatcaggctccgtgctgaagatgtgcagggcaggaatgtgctcacaaacttttggggtatgaattttaccactgataaattgaggtccctaatgaagaagtggcagacattaatcgaagcccatgttgatgtcaagacaaccgacaactacatgtt

SEQ ID NO: 17750 - DNA, 376 bp, Zea mays
  Clone ID: LIB84-014-Q1-E1-F2
accacacgtccgggtgcagctcgccttccaaaacaacacgctggagggatccttcataaagaacgacgtcccttattatttttgggccttctttccaaaaggagacctcacaggaccgaagggctttgcgctatcgtcctacagcaacgaagtgagcaccatcgagccgttcctgatcgatgagaagaggataacggccaagtacgtggtgttctgggtctacaagaggctggctgggcaaggcatccttccggtctggaaggaagaggagggggacgaggacgccgccaagtagtaagttgcgcaagcgcatacgcatacacatacacacacacatggtgctgccgtgaacatacacatgttacactgtaaagtt

SEQ ID NO: 17751 - DNA, 183 bp, Zea mays
  Clone ID: LIB84-014-Q1-E1-F3
gcctccgcggctcgctccgccgcctcgccatggactacgtcgacgtcgtctactgccaccgccccgacgcgtccacgcccgtcgaggagacggtgcgcgccatgaactgggtcatcgaccagggctgggccttctactggggcacctccgattggtccgcgcaccaattaaccgaggcctggg

SEQ ID NO: 17752 - DNA, 190 bp, Zea mays
  Clone ID: LIB84-014-Q1-E1-F4
gggtcgaggcacgcgtccgaacgaagtgcgagcgacccacgtccacacgacacgaaccacgaccagcaaccagcagcggcaccacgcacccagcgcggggccattgcgtcgctcaccatgatggcgtccttcgcccccgtggcggtcggcgcgccctcgcgctgcagcaccttctccgtggtcatgtccg

SEQ ID NO: 17753 - DNA, 84 bp, Zea mays
  Clone ID: LIB84-014-Q1-E1-F5
atctgcacacgcgggtacatgttggaagttattgcaggacatgtatatgtataggacaagtttattacagtcctgattgattgc

SEQ ID NO: 17754 - DNA, 412 bp, Zea mays
  Clone ID: LIB84-014-Q1-E1-F6
cggacgcgtgggatctatcatccgcgcgcggggtctgagagcagagcggcagggcgccatggcggcatcggtggcgctgagcagcgggcaccggatgccggcggtggggctgggcgtgtggcggatggagaatgcggacatccgcggcctcatccacacagcgctccgcgtcggctaccgccacctggactgcgccgctgactaccagaacgaagctgaagttggtgacgcgctcgcagaggcattccagaccggactcgtcaatcgggaggacctgttcatcacaaccaagctgtggaactcagaccatgggcatgtgcttgaagcctgcaaggacagcctgaagaagctgcagctagactatctcgacctccacctcatccagttcccagtagccactcggcacaacgga

SEQ ID NO: 17755 - DNA, 396 bp, Zea mays
  Clone ID: LIB84-014-Q1-E1-F7
atattattgcaatggagttcagacaatttttttagcattcaccattggtttgttcgttggtctgtttttggctcagtatttttttctcgcgcaagtcttctctacttgttgtgcattaggaagtttggggttctgcactgacttggctccattggagtattcgtcataaaagaatttctgtcgtggattgagtacaaggagcaaatgtgtcattgcgtaccaatcagttattgtgctgtaatttttttatttctttatttggtttccgggcaaaattgagattaacacatttcttcccacagattgcagttcttggtggctctttgctgggaacattcctgtctgaaaagattatagcatacattggagggagcccaatcttggcctttgctgcga

SEQ ID NO: 17756 - DNA, 103 bp, Zea mays
  Clone ID: LIB84-014-Q1-E1-F8
agtaaatattagtatattgcatagaactatatataggtggtgccaatatacaggtgtttaaaaaaaagggggggggtcattctaggaatctgtatgttttact

SEQ ID NO: 17757 - DNA, 407 bp, Zea mays
  Clone ID: LIB84-014-Q1-E1-F9
acccacgcgtccgaatttcggcatatcggcgcacctggttggcagcttgggtggacatgggcaaagaaggaggttatatggtcaatggttggggctcagaccactgaacagggcgactgctcaaagttcaagagcagcctaccccattgctgcaacaaagatccaacaattgtcgatttacttccaggcactccatacaacatgcaaattgccaattgctgcaaggcaggacttgtaaatacctttaaccacgactcagcaaatgctgcttcctccttccagatcagtgttggtcttgctggaactaccaataaaactgttaaggtgccaaggaacttcactcttaagactccacgccctgggtacacatgtgggcatgccattgttggcacggctacaactttttt

SEQ ID NO: 17758 - DNA, 335 bp, Zea mays
  Clone ID: LIB84-014-Q1-E1-G10
acccttccatgtggtcatccgccgacaaccctcaccgcgcttccgctgccaatcctcgccgctcttccgctgccaaccgttgcgccggcccgactctgtcctgaagccgtggcgtacgggggattcacttccattcgacgcaatctggcctcgtcgtccatctcgcgggcgcttgttcgtgcgcgtggattgttttatcagggtctcgtacccgtgccctaagtgggagcgtccgctaagtttcctcctaaagggcgcaatcactatggctcgcaactgccttacagcgtgcagcaaccgtactgccaaatccctagtagcactggatttgcagc

SEQ ID NO: 17759 - DNA, 333 bp, Zea mays
  Clone ID: LIB84-014-Q1-E1-G2
gcgtccacccacacgtccgcccacgcgtccgcccacgcgtccggacttgtttcattgattcttgaagagatcgagcttcttttgcaccacaatgtcgaggatgtcttgcaactgcggatcaagctgcagctgcagctcaagctgcaagtgccgcaagaagtaccctgacctgtaggagacgagcaccgccgcgcaagccaccgtcgtcctccgcgtggcccccgcgacaaaggccccgccccaattcctccaggccgcggcagaatccggcaaggccgcccacagctgcaactgcggtggaaacggcaactgccaaccctgcaactgctgatc

SEQ ID NO: 17760 - DNA, 402 bp, Zea mays
  Clone ID: LIB84-014-Q1-E1-G3
aggacgcgtgggcggacgcgtgggtgcaactgcaagctaaggagagtgtgatcaccaacagctagtgctagtcccccttccttccatccatccatggcatgcgtcagcaccttccagagctgccccattgccagaagagcaaagatcaacaccaggtccacgggcagcagcagtagcgtggcgaaggggtcaccaccaccagccttccagttccagtgcagggcgtcgactttcgcggcggacaccagcctccggctcgagctggacgagaaccccgaggcgatcatctcgggggcgtggcccgggaactgctccctcctcagctacgacgacctccgcgcctacctcgagtcgcaggagacggcggcccaggcagaacgtcagcgcggcgtggcgctcctg

SEQ ID NO: 17761 - DNA, 422 bp, Zea mays
  Clone ID: LIB84-014-Q1-E1-G4
gcaagtacaacatggagatgtcctccaaggcgtacaaagcctggaacttcacggaccttgctcttcccaacgatctcatcaagagaggtctggcgaaaggagatccaaagaagccagagacgctggagctggcgataaaggactacccgtacgcggtggacgggctcgacatgtgggcggcgatcaagaagtgggtggctgactactgcgccatctactacgccgacgacggcgcggtggcgagggacagcgagctgcaggggtggtggagcgaggtcaggaacgtggggcacggcgacctggcggacgcgccgtggtggccggcgatggactgcgtcgccgacctcgtggagacctgcgccaccgtcgtctggctgagctcggcgtaccacgcgtccatcagcttcgggcagtacgactac

SEQ ID NO: 17762 - DNA, 416 bp, Zea mays
  Clone ID: LIB84-014-Q1-E1-G5
agaatccgcagtactatgaaatttctgccaagagcaactacaattttgagaaacctttcctgtacctcgcaaggaagctggctggtgatccgaaccttcactttgttgaagctgttgctcttaagcctcgggaagttaccatcgacatggctatgcagcagcagcatgaagctgagcttgctgcatcagctgcacaacctcttcctgatgacgatgatgatctgattgagtagagaggatcatgattcttgaacttgagcaagagttgtgccatgcgtgttttaaattgttctacggtgaactcatgagttctcattgtctggatcatctttttctccttgggtgtgttgcatcttttgagtgtggcaatggatggtactcctcgccatgaatttgctgggtactttaaacattgc

SEQ ID NO: 17763 - DNA, 419 bp, Zea mays
  Clone ID: LIB84-014-Q1-E1-G6
attcggtggcgcccgcccggagctcggatgccgcggcgtcggcgtcgtggatcgacaggaagctgcttgttgatccaaagatgctgttcgttggggacaagattggggagggagctcatggcaaggtctacaaggggaagtacggtgatcaaattgtagcgataaaggttcttaaccgtggcagcacccctgaagaaaaagcaacacttgaagcccgtttcatccgagaagtaaatatgatgtgtaaagtgaaacatgagaatcttgtcaagtttattggagcttgcaaagaaccattgatggtgatcgttagtgagctactaccagggatgtcactgaaaagttacctgcatagcatacggcctagccaattagatacacacactgcaataacctatgcactggacatagctcatgca

SEQ ID NO: 17764 - DNA, 329 bp, Zea mays
  Clone ID: LIB84-014-Q1-E1-G7
accacgcgtccgcggacgcgtgggcgcacgctcaactcaaacccccgtccctaacgcagaagaccggcggcagcggcgggggtgtgtgtgtgtggactggactgtaaccaattgccagcaatccagtcatccatccatccatccgccccgctgacggcgggaatggcccggctcgtgctctccgagtgctgcagcctcgcgccgctccgcggcctggtcgccgggcggggcgccattgcggcgccatcacgccccgcgctctccgctgcgccgcgccgtcgtcgcacgtccacctccatccaccgctactgggcgctccgcgtctccgc

SEQ ID NO: 17765 - DNA, 259 bp, Zea mays
  Clone ID: LIB84-014-Q1-E1-G8
ctcttcgaccggccgcagcccaactcccccaccgtctacgactggctctacagcgacgagaccaggagcaaccaccgctagatcgggcgagatggatggacagtgaagaggccatgtttgctggtccttgtggttatctaaaacgcacgcatgctctattatagctagtcatcactatatatatacttgtgtttgtgtattgttgttcttgttctgctggtgtctccgccgtttaatttgacctagttctagatcgcga

SEQ ID NO: 17766 - DNA, 410 bp, Zea mays
  Clone ID: LIB84-014-Q1-E1-G9
cgccgcaccagcgccagcccgcgccgtggtcagaaggaggtccttcaccgtgcgcgcctctctccgcaaggccaccggcaccgccgccgtggcaatggctgccagcgccctgcttgccggcggtgccatggcccaggaggtgctgctgggcgcatgcgacagcgggctcgtcttcgagcccagccagttcaccgtcaaggccggcgacaccatcacattcaagaacaacgccggcttctcgcacaacttcttcttctacgaacacgaggtgccgagcggcgtcgacgccaccaaggatctcgcatgaggacttactcaacgcgccaggcgagacctactccgtcaccctcaccgtgccgggaacctacggcttctactgcgagccgcatcaaggagcccgaatggtcggc

SEQ ID NO: 17767 - DNA, 398 bp, Zea mays
  Clone ID: LIB84-014-Q1-E1-H1
gatcgattcaaaaatgaatggcacaggccatcgatagattgattcatccactgatgacgatacatgcgtctgtgcttagtttacatcgaccgcttacagcaggcagccattgacattgattgatgagcacacatcgatcatgagcatacgccggctggtgcaactactacacgcctacgatctgaacaagtagagtacagagaagaccacactgttcactcgacggacggacgaacgaatggatggatctgatggtagtacacatgtacggcgttgctcagtcagttagttgccggggacgaagttcgtggcgtatgcccaggcgttgttggcgacggggtctgcgacgtggtcgaagaggttctcgatggggcccttgccggtgacgatggcctgca

SEQ ID NO: 17768 - DNA, 294 bp, Zea mays
  Clone ID: LIB84-014-Q1-E1-H2
gtacgagacaaattgtattaatcgtatggtataatatttatacatgtgcaagatgagctatgcattagacagtagaaaaacccgaccacagtgtaaagcccctgtcgcttcctcgcccccgactcgcccctcatggcgaggaggcgctgctgatgcctcgcggcgtcagatctgacgctgggggcaagacacctagccgcttgcggtggcgctcgcctacgctcccaatccgccgaacactgctcctcgggaccccccaaagattcaaggcccgtctcgcctcgtcctgcctag

SEQ ID NO: 17769 - DNA, 419 bp, Zea mays
  Clone ID: LIB84-014-Q1-E1-H3
accacgcgtccgcccacgcgtccgcgcccgcgtcgacttcctagggttcgaggaacgtccgtccgtccgtccggggaaggagcacgagggaggcggagatgatcgaggtggtgctcaacgaccgcctggggaagaaggtgcgggtcaagtgcaacgaggacgacaccatcggcgacctcaagaagctggtggcggcgcagacggggacgcgccccgagaagatccgcatccagaagtggtacaacatctacaacgaccacatcaccctcaaggactacgaggtccacgacggcatgggcctcgagctctactacaactgagccgccgcccctccctccctctcgtcaggttggtctgaattctgaagtcatgggtgcaattcgcttcgcggtgatctctaagctcatcacatatataaa

SEQ ID NO: 17770 - DNA, 352 bp, Zea mays
  Clone ID: LIB84-014-Q1-E1-H4
ccgtggcagacgaagaacaccttccaccagaccggcaccgaggccctgacctgcggcgtcaagggcggcgacgtccacctcatctccgaggccgcgacggacaccgaatgggacggcgactgcgccatgtaccggcatgccgacggcgacctcgtcgtcctcccgcacgacgcggcgttgcccgtctccctcaaagtcctggaacatgacatcctcaccgtgtcacccatcaaggagttggcgcctggtttcaggttcgccccgatcgggctggtggacatgttcaatagccgcggggccgtggaaagcctgacctatcacctcctcgggggcgacggttccaccttgggct

SEQ ID NO: 17771 - DNA, 277 bp, Zea mays
  Clone ID: LIB84-014-Q1-E1-H6
cacgcgtccgcacacgcgtcaggcctttggattgggattggagcgtcttgcgatggtccttttcgacattccacatattcgactattctggtcgaatgataaacggttcacatcccagttctcagaaggcaagcttggtgtcaagttcaagccattttcaaagtttcctccttgttacaaacatatgagtttctggatcaatgatgcatttacagtaaacaacttatgtgaggttgtcagatgaatattcggggatattgttgaggaggtaaaactt

SEQ ID NO: 17772 - DNA, 418 bp, Zea mays
  Clone ID: LIB84-014-Q1-E1-H7
gccttgtatttgtactcacttcgtattccacctgcaacgctgctgcaagctcactcatctccccagcgctggtcgtcatcctccactccaatatgcagttcggtctggtgctcctaccaagtaccgacaccagcgtggtccctttttttctctgtcttggccggccacctctgctcctccctgctgccgcgtcgctggcccagctcggatctcgtcgaccccatgttgagctcccatctgccatggtcgccggtcagcccctgcgcacggcttcctgcgcgccgggatggctcgtctccactgatcaaggacgcttggaaacagcagtagcccatctcagcactagctatggtggtcgacgttcagtcggaccgtgccgctgctccattcatggctgcgagtccaactccggcgagct

SEQ ID NO: 17773 - DNA, 375 bp, Zea mays
  Clone ID: LIB84-014-Q1-E1-H8
cccacgcgtccgcacggcacgacgcagccgagaacaagttcatctgcccatgccacggatcccagtacaacaaccagggcaaggtggtccgtggaccggcgcctctgtcgctggccctggttcacgccgacgtcgacgacggcaaggtcctcttcgtcccgtgggtggagaccgacttcaggaccggcgaggacccgtggtggaaggcatgaggatgatccgaaaccagcggtgctcagtgctcacacatgagacctacgtatgcctccgttccttgtgatgaggaaatatgcctgcgttcggtctcccttggcgttgttcctacaaattcacttgccttctgtctccccctccatatacacactgttgtaaaac

SEQ ID NO: 17774 - DNA, 289 bp, Zea mays
  Clone ID: LIB84-014-Q1-E1-H9
acggaagttccaggccccgttgcagctgggagtggttttatactcgctgatgacatcaagtcttaggtgcttccattgatcaatgactcagggaaatatggagggatcatgatgtggttcaagtactatgatgatcaagatggctacaattcttgagtgaagagtgatgtttaagttgttgtctgtggtgtgtgacaatatctgtgtgttacttgtgtgtatgtgagaaattatgtgactctggagtctggatagtgcaataagtattactcaagtatatgatgtgaaa

SEQ ID NO: 17775 - DNA, 92 bp, Zea mays
  Clone ID: LIB84-015-Q1-E1-A10
cccacgcgtccgcccacgcgtccgcccacgcgtccgcccacgcgtccgcgcgtgtggagccatgcttgccagcgcgacgagagcagggacgt

SEQ ID NO: 17776 - DNA, 84 bp, Zea mays
  Clone ID: LIB84-015-Q1-E1-A11
tgatatttttgaactgtgtttgcattttgcaagctccacaaatatatctcttttggaaaatcttgcttgaaaagcgagaataaa

SEQ ID NO: 17777 - DNA, 89 bp, Zea mays
  Clone ID: LIB84-015-Q1-E1-A12
ctgacacgtgggcgcacatgccggtcaggccaagcgtcttgcacctgcggttcaagtcgagccacggtcacccacctcatgggtgtgaa

SEQ ID NO: 17778 - DNA, 438 bp, Zea mays
  Clone ID: LIB84-015-Q1-E1-A4
cacagcacatagatcgacgacgatatcgggaagcaatatggggttggccttgtcgcggcgcatggcagcggaagacggcgaggctgacagtccggcaccggcgccagtgccgccgaccggtgctgctgctgcttccggcggcggcactgaaaagaagaagcaggcggacgactcgtcgtcgtcgtcaaagacgacagaatgggttcctcataagttctctgagatcgtcggtcaaagacgacctggtgaggatatgttccgagggatctaccttccacaatcggatcagcagccgaaaacaacaaagaagtactgggtagatgggagaaatgccaactgcttcatgctgttccctaaaggattcagcatcacctggggttcggacgaaaggtactggagttggcgcaagctcacacaagaagagaaaagagggatcga

SEQ ID NO: 17779 - DNA, 423 bp, Zea mays
  Clone ID: LIB84-015-Q1-E1-A6
cgagaaggagaactccatgctccatgagcaggtcaccatgctgatgaacatgctcgacgagaacgagggtttcgacgaggacggagaggccccgccgcccgattccttcgattaagcgttgttacagtactatatccgttttctttttccgtcagtgtgaaatcatacgtctctaggtgctggtttcagagtatccgagagatatgtgctagctagctgtgtagtaggatttcattggtgatcgtattccattacattacatggctttggcttctgtagataaagggtgcattgcatgtctgttgtaccgtactgtacctactccttttctaggcttcaaaagtgtatgtgagaaactagcaacatgttatatttgaatcgaagtgtatgtacatgttacgtaaaaaaaagagagggagcggg

SEQ ID NO: 17780 - DNA, 421 bp, Zea mays
  Clone ID: LIB84-015-Q1-E1-A7
cagacgcgtgggggcgacgggaaggccaggtctagcaagtcgcgcggcgatgatctcctcaccctctccgtcgctgtcgccgtcgccgtccgggacgccttcgcccaagggcgtctccgctacgccgcggcagggcagcagcaggtggcgcagcggcgcggtgcgcggggcgtacgggcggcgcctgctggacgcgctccgcgccacgggcgacggccagccgcgcccacgcgccgtcaaggcggcggcggactcggcgctggcgctgaccgcgcgcggccagacgcggtggagccgcgccatcgtgctggccggtgcggtctgcggcggccgacgccgcgtcctcgtcaagggcggcggcaacgtccggcggcggcgccggcgccgcccgccggttgcaggccagtagacgaggcggcgg

SEQ ID NO: 17781 - DNA, 424 bp, Zea mays
  Clone ID: LIB84-015-Q1-E1-A8
acgagcgagagcagcacacactgcacgcagctagctaggagcagcagcagcggcggcgatggcggcctccatgatctcctcgtcagctctggcggtggcgcctcagggcctgccgcccctcggccgccgcgcctcctccttcgccgtcgtctgctccaagaagaagatcaagaccgacaagccctacgggattgggggtggcctgaccgtcgacgtcgacgccaacgggagaaagggcaagggcaagggcgtgtaccagttcgtcgacaagtacggcgcgaacgtcgacggatacagcccaatctacaacgaggatgactggtctcccaccggcgacgtctacgtcggtggaaccactgggcttctgatctgggccgtcaccctcgctgggatcctcggcggcggcgccctcctcgtctacaac

SEQ ID NO: 17782 - DNA, 96 bp, Zea mays
  Clone ID: LIB84-015-Q1-E1-A9
cggacgcgtgggggatcatagaatctactgtaatcactgcaacagagtggtctcactcttctctcatttaagtaatttcttcaggttcatcgtaca

SEQ ID NO: 17783 - DNA, 448 bp, Zea mays
  Clone ID: LIB84-015-Q1-E1-B1
cccacgcgtcagcccacgcgtccggggatttgattattgattgggtacaagaaggttttcaagagtttttccagaaactcgatggacattttcatgtgctttctgggagaagcaaaacaaattcacaagagtcaactatggattctgtgcaaactgataagatccccacagtcttggtacttatgcttgcacaactctgtgtttacattgaacaaacaacagttcctaaagttacagaggagttagcttctttttttggaggtggtgcacatagctacgaatatggaccaccttttgtgcctggagaaatatgtcggctatatcgttcatctggagagaaattcttgcaccattacataaatatgaagacccagaagatctccaaacttcttaacaagcgatttacaacaccagtttgggttaagcacaaggaaccttagggaagtga

SEQ ID NO: 17784 - DNA, 94 bp, Zea mays
  Clone ID: LIB84-015-Q1-E1-B11
cggacgcgtgggcgcagtcgccgttctcatcgcctacgccatggccatgctcttcctccgcatcaagatccccggctacctttggtgaggctga

SEQ ID NO: 17785 - DNA, 92 bp, Zea mays
  Clone ID: LIB84-015-Q1-E1-B12
cccacgcgtccgcgagtagatcaaaaggaggaggaggatggcgaggagttcgttcaagttggagcaccccttcgaaaggaggcaagctgagg

SEQ ID NO: 17786 - DNA, 388 bp, Zea mays
  Clone ID: LIB84-015-Q1-E1-B2
ctcgcggatccacgcaagcctctaaactgattcttaatataccattacggcaagtactgcttcgcctggggctgctgcgcgctcgagggcgccacctgctgcgacgatcactacagctgctgcccccatgactaccccatctgcaacgtcaggcatggaacctgcctcatgggcaaggacagcccattgtcactgtcagtgaaggctacgatgcgaaccctggccaagccgcactgggctttctccggcaacacagctgacgggatgaagagcagcgcatgagaaaacgcagcgtggcattaggtcgtcagcaacctgtgtggtccattagagcccctgcgtgggaaatggtcacctggccccctgattgacgacggaagcatggctc

SEQ ID NO: 17787 - DNA, 430 bp, Zea mays
  Clone ID: LIB84-015-Q1-E1-B6
cagacgcgtgggctcctatggcatctactcacgcaagcagtcctattcctgattccttgctcggcttgcgtggcccatggattcgatgtcatatcatgtgttgtttgctcacccgcctggtcgcagttcgtgtcggatggcgtgttcttcgcggagctgaatgagatgctcgcggaggacggctactccggcgtcgaggtccgcgtcacccccatgtgcatcgagatcatcatccgtgccacccgcgcccagaacatactcgcgagaagggccggaggatcagagagctggcttctgtgattcagaagcgctttaacttatcagagggtggcgttgagctctacgcagagaagctgaacaaccgcgggctctgcgacattgcccaggccgagtcgctccgctacaagcttctcggtgaactcgccgtgag

SEQ ID NO: 17788 - DNA, 431 bp, Zea mays
  Clone ID: LIB84-015-Q1-E1-B7
catgaagaactggagggagcagagttggaatctcagcttcttgagcctgttgcagctcctccggtgcatccagtgcatgtcccagccaacaagcaaccagctcgccctgccccacagaaagttacagctgaagatgatgaacttgctgcactgcaagcggaaatggcattgtgatcaggttctcatggagaggtgaaacatgtaaatgaagatgaaagctgagtcagctatactatatatttgccatgcgtgtacaaacttggccggatatttggcaaccgcagcagaaaaaagaggctgctccagcccagtgcttgtttcagtgactttggaatctgttgtcgatcgatgacagttcttctgttaatgtcgctcggttagctctacgctaattattcagatcacccaacgtgcagtgtttcagtgttttg

SEQ ID NO: 17789 - DNA, 348 bp, Zea mays
  Clone ID: LIB84-015-Q1-E1-B8
acgagcgccttgtgatccttgactgcgtggaggggtaaccgcggtcacagcctagttttgttcttgctcttgatttttgccttcactggagagtagtggcaatctaaaaaatgtggagttactggagtaggtttggtcattgatgatgttttcagccatgttccatgggaactttttacatacaaagaaagtataggttgttataattgatgtaaaaaaaaaaaaaaaaaaaaaaaaaaaaaaaaaaaaaggaaaaaaaaataaaaaaaaagaaagaaaaaaaaaaaaagagaagaaaaacaagaagatcaaaaaaaagaaaggggcggccccccaaagggttcaaag

SEQ ID NO: 17790 - DNA, 118 bp, Zea mays
  Clone ID: LIB84-015-Q1-E1-B9
ttccggggttaacctacgcgtccgaaggagtccccgctcgggttcaaggagctggagtggttcaccgacatcgacctcttccacgagcagacgccgaaagccggcaggagattggctg

SEQ ID NO: 17791 - DNA, 434 bp, Zea mays
  Clone ID: LIB84-015-Q1-E1-C1
aatccatccatgacgcatcctccttcgcattgctgggccttagcatactgtcaggctaccagcaagcgaagtagctagccatgctcggcctccccgccgcgcccccggccgccgcagcaccgccgaacccgaagggcaaggggcgatgcagcgccgccccgccaccagcgatgacaggccgggtgtcgctggctgtccctgcggcggctgtctcgctctcgctcttcctctggtccagtccagtgaacgccggcatcctgtccggtttctcgggactggagtcgactcccggccccgacctcccccggctcgagttcctggagaaatggaatgcggagaaccagaagaagtacaccgagttcgataacaggttcaagaagtccaaggtgctgcacgacctgctcgagaagagcaggaagaacaaagagaagaac

SEQ ID NO: 17792 - DNA, 92 bp, Zea mays
  Clone ID: LIB84-015-Q1-E1-C10
tgaacctcttaaaaaatgtggggtcagtgatggagagatatgcatgatagcaaacattgggcctgagaccgttgaagaggtttatgcactag

SEQ ID NO: 17793 - DNA, 93 bp, Zea mays
  Clone ID: LIB84-015-Q1-E1-C11
cacacgcgtccggcggacgcgcggccggtatccaccaccaccaccacccaaccccaaaccccagagcctcccgtccgttgctggggtttgggg

SEQ ID NO: 17794 - DNA, 92 bp, Zea mays
  Clone ID: LIB84-015-Q1-E1-C12
cagcaatcgtcagacatatctaaagataagcaagttgatccagctttagcagacacactgaagctctccttcacacgctcagagttttccat

SEQ ID NO: 17795 - DNA, 341 bp, Zea mays
  Clone ID: LIB84-015-Q1-E1-C3
ccagagcctgacagatttaggcagccacttcttgaggaactacgttatgatgagattattgctccatctagcccagaggagacggtggctcttgccgaggagacacttgaagcgtgggaggccgttcgggacggagccttgaagcttatgaagggctatgcagtgagggtttgtggatactgccctgaggtgcatgttgggccaactggccacaaagcacggaactgtggagcttttaagcaccagcagaggaatggacaacatggatggcaagcagcggtgctcgatgacctgatacctcctaggtacgtgtggcacatgccggaatccggggaaaaact

SEQ ID NO: 17796 - DNA, 392 bp, Zea mays
  Clone ID: LIB84-015-Q1-E1-C4
cacgcaggccagcggcggctacaaggtggccatccttggcgcggcgggaggggtcgggcagccgctgtccctgctggccaagatgtccccgctcgtctcggcgctgcacctgtacgacatcgccgccgacgtggagggcgtggccgccgacctgagccactgcaacaccccggcgcgggtctccggcttcacgggcgaagacgagctcgcggggtgcctgtcgggcgcggacgtcgtggtggtcgccgccggcgtgccgcggaagcccggcatgacgcgggaggacgaccggttcggcgccaacgcgggcgtggtgcgggagctcgtggcggcggtggcggaccacgcgccgccgggcgcgctggtgcacgtgatcagcgacgccgtggact

SEQ ID NO: 17797 - DNA, 294 bp, Zea mays
  Clone ID: LIB84-015-Q1-E1-C5
cacacgcgtccggcatttgatgatatctaaggcaattcatgtaactccaccttgctgattcccagatagggttgcagatgattgaaaaatggctttgtacaagccgacgagcctcttgccatctagggcctttctcatgataatgtcttcttccttagtgaaaatttttgtggctgttgagcgttctatatgccttgtaagatgtattattatgaactttaactccttcaatcatccaggtggaaattttgtggaccatggtgcaattgaacaaaatggtgatattgtagaacc

SEQ ID NO: 17798 - DNA, 440 bp, Zea mays
  Clone ID: LIB84-015-Q1-E1-C7
cagacgcgtgggcggacgcgtgggtgcaaatctcagccttcttcgcttgtaccagtttgagccagaaaggatgagcatacagattgtggcccacatactgattaaggctctcatggcaatgccagcccctgacttcagtttgtgcttattcttaatccctgaacatgtgcaaatggaggagcaattcaaggtattgatagttctttctcactacctagagactgctaggttcagtcaattttgggatgaagcagcaaagaaccgccacatatcggaagcagtgccaggtttcgaacaagcaatccaatcctatgcgattcatgtactttccttgacataccagaaagttccaaggcctattcttgtagaggcaatcaacatcgaaggtctcgcgttggacaagtttcttgagtaccatgccgcgaactcaggttgggtga

SEQ ID NO: 17799 - DNA, 419 bp, Zea mays
  Clone ID: LIB84-015-Q1-E1-C8
cggacgcgtgggcggacgcgtgggcggacgcgtgggctgctgcgcttccaacaccatggacggcgggggatccggcaatgcctccggcggcagcggcggcgcatcgacgtgctgctactacgcgctcctcggcatccgcaagaacgcctccgccaccgacatacgcgccgcttaccggaggctcgcgatgaagtggcacccggaccggtgggccagcgaccccggcgcggccggcgaggccaatcagcggttccagcggatccaggaggcatactccgttctgtcggacaaggggaagaaggccatgtacgacgccgggctcttcgaccccctcgacgacgacgaccaggatttctccgacttcatgcaggagatgctggtgatgatggatagcgtgaaaaacgagaagccggacacgc

SEQ ID NO: 17800 - DNA, 94 bp, Zea mays
  Clone ID: LIB84-015-Q1-E1-C9
tgaagacaccggtgcaccggccacagctctccttgatgctggcccttcacaagtttaaaacgtcagagaacctcaggagatattcaatcgatgg

SEQ ID NO: 17801 - DNA, 90 bp, Zea mays
  Clone ID: LIB84-015-Q1-E1-D10
ctgggatccacacgctcaagcggctgacagagcccggcacctacgagtacttggacaagatcaccggcgaactcgtccgtgggatactgg

SEQ ID NO: 17802 - DNA, 91 bp, Zea mays
  Clone ID: LIB84-015-Q1-E1-D11
cccacgcgtccggcgtattttggagcacaggttttgcttctgaagttgttttttcttggttcctgtatagaataattttgtcatggcactt

SEQ ID NO: 17803 - DNA, 89 bp, Zea mays
  Clone ID: LIB84-015-Q1-E1-D12
gaggcgctgaccacccgccgccgagtccggcgaaacaaccgcctgtagttccagagtagtacctcatggcggccatatcgtcacttccc

SEQ ID NO: 17804 - DNA, 379 bp, Zea mays
  Clone ID: LIB84-015-Q1-E1-D3
ggtcgccctaaccacgcggctactacaagtgcagcacggtgcgcggctgccccgcccggaagcatgtggagcgcgaccccgccgacccgtcgatgctgatcgtcacctacgagggcgagcaccgccacagccccgcctccggccaggacccgccgccgccgtcgctcgcgccgctgccggagctgcccagccattgatttggcttcctgcctgctctgtcctgtcaattactagtagctgttgtcataagttataaaatcaaaatcgccagttcagttttagcagctccgttttccgagttttttctcttctgtcgttcgcgttagcagctttgtgaaaggattacgaaagtgttagcatcagacttggagaagggaaa

SEQ ID NO: 17805 - DNA, 322 bp, Zea mays
  Clone ID: LIB84-015-Q1-E1-D4
ccggatccacccacgcctctggagtaacgcgcgcgcgtgcatgaccctagggctgggcagcggcgcccgggaggccatggagaggctggatcagaaactccgtgcgcagagacaacctgtggtgctcaagaggcatgaggtgagcacgagccccactcccgcgaaagcgcacgaagacgcaacgttcagctgcagtctccatcgccagtagtcggcagcgtgcatcagcgacacgggcgtgcatctgcggcgggaagtggtgtcttctccgagacctaacaataaaggaggacgaggacggggccggttccgctggtgcctg

SEQ ID NO: 17806 - DNA, 444 bp, Zea mays
  Clone ID: LIB84-015-Q1-E1-D5
aacattttgaagcaagaactatttgcagattatgtctctatatggcctaccaaattccaaaacaaaactaatggaatcacgcctcgaagatggctccggttttgtaaccctgagttgagtgaaatagtcacaaaatggctaaagtcagatcagtggacaagtaatcttgatctgctcactggacttcgcaaatttgcagatgatgaaaagcttcatgctgagtgggcagcagccaagttatcttgcaagaagcgcctggccaaacatgtgttggatgtgacaggtgttacgattgatccaactagcctttttgatatacagattaagcgcatacatgagtacaagagacagctcctaaacatattgggagctgtttacagatacaaaaaattaaagggaatgagtgcagaagagaagcagaaggtcacaccgcgcactgtcatg

SEQ ID NO: 17807 - DNA, 396 bp, Zea mays
  Clone ID: LIB84-015-Q1-E1-D6
ggaggcgtggctcaacgcacggtcccaacgaccgcacgctcgcgcacgggctcacaggtgaccccacgtacctggtggtggagcaggacaagacgctggccacctacgggatcaacgccgtgtgcactcacctcggctgcgtcgtgccgtggaacggcgccgagaacaagttcatctgcccatgccacggatcccagtacaacaaccagtgcaaggtggtccgtggaccggcgcctctgtcgctggccctggttcacgccgacgtcgactacggcaaggtcgtcttcgtcccgtgggtggagaccgacatcacgaccggcgacgagccgtcgtggaaggcatgacgatgatccgaaaccagcggtgctcactggtcacagatgagacctacgtatg

SEQ ID NO: 17808 - DNA, 439 bp, Zea mays
  unsure (1)..(439): unsure at all n locations; Clone ID: LIB84-015-Q1-E1-D7
aacacgcgtccgcggacgcgtgggcggacgcgtgggctcgccgcctcactccctctgaggtcgcagatccgtccggttagacgaagccgcccgcacccatggcctccggtgagctcgcctgcacctacgccgccctcatcctcagcgacgacggcatcgccatcaccgccgagaagatcgccaccatcgtgaaggcggccaacatcaaggtcgagtcctactggccggcgctcttcgctaagctcctggagaagcgcagcgttgaggatctaatcctctccgtgggatctggtggtggcgctgctccagttgctgcttccgccccagctgggggtgctgcagctgctgctgcccctgctgcagaggagaagaaggaagagcccaaggaggagtctgatgacgacatgggcttcagcctgttcgacntgagacctcgcta

SEQ ID NO: 17809 - DNA, 92 bp, Zea mays
  Clone ID: LIB84-015-Q1-E1-E11
cccacgcgtccgcagacgcgtggggcacgggcgggctgctccgcaaggcgcaggtggaggagttctacgtcatcacgtggacgtcccccaag

SEQ ID NO: 17810 - DNA, 113 bp, Zea mays
  Clone ID: LIB84-015-Q1-E1-E12
tacggtccgaaatccgggacgaccacgcgtccgatcagatcagttgagaaacagctagatttttcagcagatggactggatacttctggttctgagattaagaactctccttg

SEQ ID NO: 17811 - DNA, 434 bp, Zea mays
  Clone ID: LIB84-015-Q1-E1-E3
ccacccacgcgtccgcaaagcccaaagccgagaagccgccgccgatcgggcccaagaggggcgccaaggtgaagatcctgaggcgggagtcctactggtacaacgggatcggcaacgtcgtcaccgtcgatcaggatcctaacacccgttacccggtggtggtgcggttcaacaaggtgaactacgccggcgtgtctaccaacaactacgccttggacgagatcctcgaggtgaaatgagtgaggccagtctggtcaaggaccccatgctcctgtgtgatttgtagttgtgaagtgaggctgctgcctagctgctacgttagctgctagcgtcacaacatcaatcttgtaatagcttaatctccacaatcatcatgtaatttattgcatgcttcattcaccgtggactcaataatctctcttgctctaaaatcg

SEQ ID NO: 17812 - DNA, 429 bp, Zea mays
  Clone ID: LIB84-015-Q1-E1-E4
cggacgcgtgagcggacgcgtgggcggacgcgtgggcggacgcgtgggcggacgcgtgggcggacgcgtgggcggacgcgtggggttccattacaacaaaagatcgtgctagtaagcaatacgctcaatttgagtttgaggtcgatttctggagcattcgagttcttttccagtaaacttttcaggtttaagcgcggattgatggcagagctgctgtagatttggagcattttggggttggttttttgcgatttgaggatcgaatcgggctggtacaaccgcgctcacgtgcatatataaggcgaattggcggtttgttggctacaattgttcggttcttatcttgaagggtggtgcgaattggaggattcttcccgaatcgagaaggtgtaggccaaattcgcaaggaagctgcagctatccgcgtga

SEQ ID NO: 17813 - DNA, 438 bp, Zea mays
  unsure (1)..(438): unsure at all n locations; Clone ID: LIB84-015-Q1-E1-E7
aactggttggattgcacagcttggtgggctacaatgtcgtaacttcccggcgacgcaatgttggcaaggtgcgtggtttcacatttgacatcagctcaggtgctatggagtctctcgagcttgactcttttgggctttcgattgtcccttctagcttggtaagcacgtactgtttatttgtcgaagacgtgctggatatagtctctgatacagtcgtggtgcatgaagacgccgtctcacgggttcaacggttaacacagggcattttgggcactcaaaacatccacgggcctggtggtgagattgacgagtacggtagatttggggggaggggaagggggaggaggaggagagcanatggccagggaaagtccggtggccgagaactccgcagcgaaccgaagcatccggaggatgaatgggagcttgcgatggact

SEQ ID NO: 17814 - DNA, 428 bp, Zea mays
  Clone ID: LIB84-015-Q1-E1-E8
cttgtcttgtcccagcgcccggcagctgcgccctgctccagctcatggcgcgtccctgcccctcccatggcagctccccagctcgatttccctccctagccatggccgcgcccaaatcctctccctccctgttcggattccgccagacctgcgtagctccctggtgtgtcttcctccctgcgcgctcagccagcgtccctgcgcgctccgcggtgctcagctctccagctccggtgcccagctcgccagggccgcgtgtgctccagtgtcgcgctctgctcgcggcgttcatctccctgctcagctcgccgcgccgaactgtccagcacctctctgctcctttcgttcctagcgcgtcgagttgagcttgccgatgatgctttggctggtcagcctctgctccagctcgcagttgctgcgttgccgag

SEQ ID NO: 17815 - DNA, 91 bp, Zea mays
  Clone ID: LIB84-015-Q1-E1-E9
caggaacaccttgccccatattcaggtatttatagggcatggtccagtaaagaatactccttgccctcgagctctaaccaataaccactgc

SEQ ID NO: 17816 - DNA, 91 bp, Zea mays
  Clone ID: LIB84-015-Q1-E1-F10
cacagacagtgaccataaacccgtgagatgtacattcagcgtcgatattgcaagagtagacgagctgataaggaggcaagagtttggaaaa

SEQ ID NO: 17817 - DNA, 92 bp, Zea mays
  Clone ID: LIB84-015-Q1-E1-F11
gtcgtccctgccagcgttcgcgccgacggcgttcctgttctgatcatggcgtcggcgtcggcgactcgtcgtcatccacgaggacgacgacg

SEQ ID NO: 17818 - DNA, 82 bp, Zea mays
  Clone ID: LIB84-015-Q1-E1-F12
cacacggttccaggcaggacattcagatctgcggcgacgtcggagagcgccagatcttcatgagctagaacatggcgcagca

SEQ ID NO: 17819 - DNA, 436 bp, Zea mays
  Clone ID: LIB84-015-Q1-E1-F2
gaaaacttcggttggttaattcaattaatgttttaatgaaaacttaggtgactgcagtttaaacgactgcatctgtcatcctgtgttgtttggatacatggaactagtagtagtagtaaagtaaaattcggtccaccttttggtacaccgtaaggatgaaccaggatcaaaattctgtcaactaaactgattgtatggccgtcagacgttctgtgtttttgcactacttggtctgacgagaggatggacggccaaggactggggacactactacacaaagaaacaacaaagccactgcagaattctctaacctatatctgtggaaaaaaaaactagctacactccggggcagatgcaggatttagagactgtgtattcaaaatttagaatgggagttttcctgataacgcctcaaaaatagaggaagagaacgcga

SEQ ID NO: 17820 - DNA, 347 bp, Zea mays
  Clone ID: LIB84-015-Q1-E1-F3
cacttggcgccctatggaagagatagaaaggatattgtttcgttgcttaatccaaatgtatatgttatgttcggcaaagtgtacacccgaaggcccagaagggcagttgatcgacccacagtaggggtcgatgcagataagagattaggggaggattaaatatgttcagttgcaggattgttatgcaacaaatccagtccttaaaataaggagtctgttagctaagtcttaggagataagtcgtaggatgtggagtctgccaggaggactcggactatatagtccttttggttgtaatcatgaatgtaaagcaagtattaatctaaagaagggattactcttgcctc

SEQ ID NO: 17821 - DNA, 413 bp, Zea mays
  Clone ID: LIB84-015-Q1-E1-F6
ggctcgattaaccacgagtctcagctcaactctgtacaatgatgaaacaaatgacaacactttcggggcgctaaggcctcctttggattaaaagataattcatgtgtttttgaaccatttcctgtgaaattcatataccatccccataaaattcctacattcgaaaggaagcctaaaactcggctgagccaggaactcggggaaatgggatggcgtctctgatgttgtctattccagtagcaaactgtacaagccgctcaaatccaagaccgaaaccggcgtggggaactgatccatatcgccgtaggtccagataccaccagtagctctccttgttcagattttgctcgtctagtcgggcttcaaggtaatcaagacgctcttccctctggcttcccccaataagctcacca

SEQ ID NO: 17822 - DNA, 428 bp, Zea mays
  Clone ID: LIB84-015-Q1-E1-F8
attcctctgaatttttcgtggtgccgctgctctgctcagcctccagctcccgcgccggcccgagcttcctccagctagcccctgcgctcgccatggcagccgctggtttcggctccttgcgcgccatggccgccttgcccgtcccctagcactcgattcctccaccagacatccctcctcttcaacctcgttgtaccactgcttggagtttgcgcagctccctccctgtgtggtgctccagccgagctcgccccggtctcttgcttctatggtggatgagctttcctgctggcgcgcgtgtgaagccccctggccgcgtctccctcttcctccctctgcatcctccatgcccgagtccggaatcctagtcgcgccttccctgccctctgctcgatgttccttggcgcgtctgctccagcgtcgcgcga

SEQ ID NO: 17823 - DNA, 93 bp, Zea mays
  Clone ID: LIB84-015-Q1-E1-F9
cacacgcgtccgggcaggacatcaagaaccccggcagcgtcaaccaggaccccatcttcaagagctacagcctgccgccgcacgagtgcggct

SEQ ID NO: 17824 - DNA, 364 bp, Zea mays
  Clone ID: LIB84-015-Q1-E1-G1
gatgtacaacacgccgtcggcccaggagatgtcctacttggagcacgtgcagaggcgccacgaggagaagggctgcctctacgcctgcatcttcactgcgctgtgctgcttctgctgctacgagacctgcgagtgctgcctcgactgcctctgctgctgctgcaactagccggggctaactccggaggacggtcgagacgcagcagatggaggtcgcctccgtctcttctacctacctaccaatctacctagtgatgatgattcagttcccgtttagtctggtggtgtgcaagtgcaaacataataacgcacgcatgtcgtagcgtaatacaggagagatgttttactctgtcagttccagttt

SEQ ID NO: 17825 - DNA, 142 bp, Zea mays
  Clone ID: LIB84-015-Q1-E1-G10
acgcctgccggttccggtcgcaaattcccgggcacaagcagtttcactgcacccaccgagaacttggactatcagagctcccagtagaaggagtgtaaattaaagatgaagtggttgtggaagaggagtttgctccagtgcc

SEQ ID NO: 17826 - DNA, 90 bp, Zea mays
  Clone ID: LIB84-015-Q1-E1-G11
ggaggcgtgtccgcgcacctgttcgccgtgttccagggtatcctcaagatgattgccgggctggacaccaacttcacggtcacggcaaag

SEQ ID NO: 17827 - DNA, 94 bp, Zea mays
  Clone ID: LIB84-015-Q1-E1-G12
cacacgcgtccgcccacgcgtccggttggctgatacatattactggatacgttaagagtcaagttaaatgtgatgaagccatgtataactgcat

SEQ ID NO: 17828 - DNA, 403 bp, Zea mays
  Clone ID: LIB84-015-Q1-E1-G2
catgcttgtcaatcttcctgctccaactattggtttacagccgccactggcaagaaacgctggagctattgccaactttttcgataactgccctgataatactttccaaattgctatggctggaaggtcattctcacttctgcacaggattggagcttttgtgacgaatggtataaagcttttggcagtgggaactactgcttctttgattggcactagtgtcacgaatgcagcgctcaaagcaaagatggctgttgataaggaccttgaggacgaagtcatggaaattccagtcgtctcaactagtgttgcctatggtgtatacatgtccatttctagtaacctcaggtatcagcttctggctggtgtgatcgagcatacgatgctggagccgttgctgcat

SEQ ID NO: 17829 - DNA, 472 bp, Zea mays
  Clone ID: LIB84-015-Q1-E1-G3
ctcgcggatcgacgcaagcctctacagtcactcgtgcgaagacgaagagagcagaagcgaagagcagcggcgcaaaggaaagggagccatgctcgcctcgccggcgctcgccggcgcccactccttcgcggcgtccgtgtatggaaacatcctcgtcccctcgcctcccgtccccgcgccggcacgtcgcgcggcgctgtccgtcgtcgccaaggtcaaggtggccactccccaggacgaccgcatcgcccgccacgtccgcctccgcaagaaggtaagtggcaccactgagaggccgaggttgagtgttttccgctcaaacaaacatctgtacgctcaagtcatcgacgacacaaagcaatgtactctggcttcagcttcaaccatgcacaaatctctctccaaggaatttgaatactcagctgggccaacgatcgagatagcacagaagatcggtgaggtgattgccaag

SEQ ID NO: 17830 - DNA, 420 bp, Zea mays
  Clone ID: LIB84-015-Q1-E1-G4
gtcgaggggccacaaggacgaccccgtggtgatctggctcacgggcgggcccggctgcagcagcgagctcgcgctcttctacgagaacggccccttcaacatagcggacaacttgtcgctcgtctggaatgattttggttgggacaaggcatcaaatcttatctatgtcgaccagcccactggaactgggtttagttacagctcggattcgcgtgacactcgccacaacgaagctactattagcaatgatctatatgatttcctgcaggccttttttgctgagcacccaaagtatgctaaaaatgatttcttcataactggggaatcatatgctgggcattacattcctgcctttgcaagtcgtgtgcaccagggaaacaagaacaatgagggcattcacattaactttaaaggttttgc

SEQ ID NO: 17831 - DNA, 431 bp, Zea mays
  Clone ID: LIB84-015-Q1-E1-G5
aaaacgcgctggagcggtacgacgaagcggcgttctcgcaggtggcgtcgacagcgcgcggcgccgccctggccgccttcacgtacctgcgcatgaacaagacgctctttgacggcgacaactggcggcagttcgtgtccttcgtcagggccatggccgacggcggcgcgagaccagcactgccacggtgcgacacggggcactcggacctgtacgtcgggttcctcgacgccgccaagaagagcaaggcgccggaggctgagggcgccgccaccgccgcggcattgtaggtggatgctcatgcctgtgcgtgcacacagacacatgcgccgtgctgttgtataacgtgcaccggagaacgggaactgtatgtatagattcagggccttgcaggttgcagagttttatacgctgtaatcgagcaggtcggt

SEQ ID NO: 17832 - DNA, 420 bp, Zea mays
  Clone ID: LIB84-015-Q1-E1-G6
ggcaggatcacctgcatgacgtttccccgggactggctgcggagggacctgagcgtcatcggcttcgggctcatcggctggatggggccgtccagcgtcccggccatcaacggcaacagcctcacggggctcttcttctccagcatcggccaggagctggcccacttccccacgcccccgcccgtcacctcccagttctggctgtggctagtgacgtggcacctgggcctgttcatcgtgctcaccttcggccagatcggattcaagggcaggaccgaggactacttcgagaagtgaagcggttaagatcctatccatcatccctggtgctgcgctgcgttgcgttgcgtgcgtgctcgccgctatcgaacctttgctgtatagggttccgatttcgtcgaatgtaatgtatgatgctac

SEQ ID NO: 17833 - DNA, 438 bp, Zea mays
  Clone ID: LIB84-015-Q1-E1-G7
tgaggatgactttgacccagatgagatattcagaaacttcttctttggcggtatggcgcctgcaaccaccaggcagtttggacagtttggaactttccattttaggactggtgggatgcatgcccatgcccatgcccaacaaaactctggtggctcaactgtcaggatgcttattcagctgttgcctgtcctactgctgctgttgctcaacttcctgccatcctctgagcctgtctactcgctgtcccgttcatacccttatgagcataagttccaaaccccacgtggagttgcatactatgtcaagatgtctaatttcgaggagcagtatccacaccaaagcactgagcgagcgacgctggagcggcatgttgagagggattattactccataatcacacagaattgcagggctgagctgcagcgtcgccaatgggg

SEQ ID NO: 17834 - DNA, 419 bp, Zea mays
  Clone ID: LIB84-015-Q1-E1-G8
cagacgcgtgggcgctaacttgtaatctgcaggatctaagcaaagacttgatttagttatggacggattggtaggcctcttgaaagttcgcgtggtccggggtatcaaccttgcctaccgcgacgcaagaggcagcgatccgtatgtcgtcctacggcttggcaagaagaaactgaagacaagcgtgaagaagagatccgtgaaccccatatggcaagaggagctaactctgaccgtcacagatcccagccaaccactgaagctggtgagtgagcagcaagcagaacgatcctgtttgtgattcattattctagactgtttgctacaggaggtgttcgacaaggacaccttcagcagagacgaccccatgggagacgcggaggtggacgtggcgccactgatggaggcggtgagcatga

SEQ ID NO: 17835 - DNA, 123 bp, Zea mays
  Clone ID: LIB84-015-Q1-E1-G9
gtcgccaattcacgggttacaccacgcgtccggggtcagagaacttctacagtgcctttgaggctgagcttgcagatgccatccctgtggtcaagacctctattggtggcactagaataatag

SEQ ID NO: 17836 - DNA, 356 bp, Zea mays
  Clone ID: LIB84-015-Q1-E1-H1
gcagaagccaacatacgtgtgtcaaggtggagatccgatgagtctagtgaagaagagagaacaaaccgggagagcggagctcctcttgttactataaggcgacctagattttcgagaagatgatatatccacatcctcagggatttttttaattgtttgcagctatgccctaatgtgacaacaattgttttaagggaatgtgtatgcgggatgcggctatcatgcataatctacattgccatggccgagatgtagttcaagtgtcactaaggatgctagaaaacataatcgagaaggcgtatgcatgtagcattcagagttcagtggctaaattagattttcccaacttttgtgcc

SEQ ID NO: 17837 - DNA, 90 bp, Zea mays
  Clone ID: LIB84-015-Q1-E1-H12
cacacgcgtccgaggagagttcccatgtcgcactgaatcaaagttccgagtttgcgttgtgcgattgtacctggtcaatgaatgggaacc

SEQ ID NO: 17838 - DNA, 393 bp, Zea mays
  Clone ID: LIB84-015-Q1-E1-H2
gtggggaaccatgcatggggcgttgacaactcgactctggagaacctattcagtgagcaaggacaggtgctggatgctaaggtcatctacgacagggatagcggcaggtcaagggggtttggtttcgtcacctatggctctgccgaggaggtcaacaatgccatatcaaaccttgatggcatagacttggatggtagacagatccgagtcacggttgcagaatcaaagcccaggcgtgaattttgagattttgttaaggtggtttacaggtcaatagcgtgtgttcacaagttctagtttggagcgtctagtctttcttccgtatgagtaacaaaaagatgctgataatgagagactgggagtgaaactgctgtccacaggaagatatttttc

SEQ ID NO: 17839 - DNA, 428 bp, Zea mays
  Clone ID: LIB84-015-Q1-E1-H3
caagggcatcatgtcagtggagagaagaagcaagtgtgtcatgttagccggcccattcttaacaatggaccaaagcaccgtccattgacccccatgaggcgatgccgtggtgtagcatgtgtagtgattatactgtcaacagcattcctgttggtagtttacttggctcctattactacttttgctgtgcggctgttcagtgtgcattacagccgaaaggcgacttcctttctatttggaatgtggttatctttatggccgttcttgtttgagaagataaacaaaaccaaggttgtcttctccggtgaaaatgtgcctccaaaacgacgtgtattgttatttgctaaccacaggaccgaggttgactggatgtacttgtgggatcttgcactgaggaaaggccatttaggatatatcaagtacatact

SEQ ID NO: 17840 - DNA, 384 bp, Zea mays
  Clone ID: LIB84-015-Q1-E1-H4
gtactgatgttaatgtctaaatttgaaggactgatatcgcagtcatctctggagaggcgatctgcatctaagtattacatattcttgttcttcaatgtatttttggggagcgtaattgcaggatctgctctggagcagcttaaaacttatctccatacatcagcaaacgacataccaaggatcattggtgactccatcccaatgaaggcgacttttttcataacatatgtgatggttgatggttggactggaatagctggtgaaatattgagactgaagccgcttatattcttccatctgaagaactttttcttggtcaaaaccgaaaatgacagagaagaagctatggaccctggcagtatctgcttttactcaactgaaact

SEQ ID NO: 17841 - DNA, 369 bp, Zea mays
  Clone ID: LIB84-015-Q1-E1-H5
aggacgcgtgggccgactcgtatgggaatctgcagtcatcttccatgtgaccacgaaacacgggggcacattcgacaacatgtggaagctcacctagcaggcgcattgctcgaattgttgactgcatcttgccaccaggctgtttcaggccatcaatgaacagttacccatagtatcctacactgaattcttagaacttgctggagtcgtggtaatcgatgtaaccgggggatctgacgtacccttccaccccaggaggcaagatatccctgacgctccacctgaaggtggtcttcctgatgccacctaatgttctgattagctcaggcagtttttctcgacacagatgggtcttgtgaaccaggacat

SEQ ID NO: 17842 - DNA, 384 bp, Zea mays
  Clone ID: LIB84-015-Q1-E1-H6
accgcacgacacgacaccaagtcgaggagctcgagagggcaccaataatggccggcgtgaactccagcgtcgtcgggctcaagcccgccgcggcagtgccgcaggccgccgccgcctcatcgccggcgaagcgggtgcagctggccgcgcccgagggccgccgcgccgctctgctcggcctggcggccgtcttcgccgtcacggccaccaccgggtcggccaaggccacgatcttcgatgagtacctcgagaagagcaatgccaacaaggagctgaacgacaagaagaggctgggcaccagtggagccaactttgcgcgcgcctacaccgtggagttcggcacctgccagttcccctacagcttcactgggtgccaggacctcg

SEQ ID NO: 17843 - DNA, 429 bp, Zea mays
  Clone ID: LIB84-015-Q1-E1-H8
agcacaaacgcgcacgctcatacgcaaaccacacaacccatggaagcgtcccttgccgccgccgccgtcggcttgttccctccaccgcgaatccgcatccgaatcaccaaatcgagtcccctcccacgccctcggtgcctccaatccggaccctccaagatctggacctccggttcgcgggcatgcctggtcgcggcctccgcgtccacaccgccggcgccgggaggcggcctctactcggcggcgacgtacgagctgaccccggaaaacgtagaccgcgtcctggacgacgtccggccgtacctcatctctgacgggggcaacgtcaccgtcgttgccgtcgaggacggtgtcatctccctcaagctcgaaggagcttgcggcagctgccccagctcgacgacgacgatgaatatgggcatcgagcgt

SEQ ID NO: 17844 - DNA, 114 bp, Zea mays
  Clone ID: LIB84-015-Q1-E1-H9
tccgggttaaaccacgcgtccgcacacgcgtccggtagccgccaccatgagccgctcggggcagcctccggatctcaagaagtacatggacaagaagcttcagattaagctgaa

SEQ ID NO: 17845 - DNA, 329 bp, Zea mays
  Clone ID: LIB84-016-Q1-E1-A1
aaaggacataatggatgtacacgatgacctggatgtgttccttcgtaccgagacccagggaaacaaatatttggctgtgagcattacaaaagaaactgcaagcttgttgctgcatgctgcaataagctattcacttgcagattctgtcacgataaagtaactcaagaggtccacttattgactcttatgaccatgtaattggtgttaatacaactacattaacatgtaaaggttggtagatctggaaagtcttgatggtctaatacctatctatgagtaccgaagaaaaggcgggaaaagtcggtctctgcagcatcgcgcgtgaaaaa

SEQ ID NO: 17846 - DNA, 82 bp, Zea mays
  Clone ID: LIB84-016-Q1-E1-A10
catggtttcactaccggtgcctcctacaaactttgatgcgacaaaagatgaagccccttattcatcaaaaactgtacctgag

SEQ ID NO: 17847 - DNA, 85 bp, Zea mays
  Clone ID: LIB84-016-Q1-E1-A11
cccacgcgtccgcagctcttttgttacttgcgtacaaggggatggactaatcatatcaactacatctggaagtacagcatattca

SEQ ID NO: 17848 - DNA, 80 bp, Zea mays
  Clone ID: LIB84-016-Q1-E1-A12
cccacgcgtccgcggacgcgtggggcaaaggcagcacactcagctatccagcaaaagagatcgagaggcaggagtcatgg

SEQ ID NO: 17849 - DNA, 347 bp, Zea mays
  Clone ID: LIB84-016-Q1-E1-A3
gaaggatggacatatgttgcattcgatctgaatcctgttgttgtaaagtcagctagaaaatcaggatttcctgtgctattcggagatggttcacgccctgcagttctgcaatctgctggcataacgtttccaaaagctatcatggttatgtatactggaaaggaaaaaacaattgagtctgtaagcagattgcgtcaagctttcactgcggttccgatatacgctagagctcaagacctctcacatttgttagatcttaagaaagcaggcgcaacagacgttgtcctggaaaatgccgataccagcttgcagctaggttcaatactttttaaaggactgggcgtcat

SEQ ID NO: 17850 - DNA, 412 bp, Zea mays
  Clone ID: LIB84-016-Q1-E1-A6
ccatcttcaagagctacagcctgccgccgcacgagtgcggctacccgggcagcgtcttcaacccgctcaacttcgcgcccacgctcgaggccaaggagaaggagctcgccaacgggaggctggcgatgctggcgttcctgggcttcctgatccagcacaacgtcaccggcaaggggcccttcgacaacctgctgcagcacctgtctgacccatggcacaacaccatcatccagaccttctccggttgagtcgaggtcgaggaggaatacgatccatcgctggtgagtctgatatggactggaagacaaacattgaaaccttaagttcctttctggatcagtttgtgtgtgttaatctatctggagggtacagattcgggccgtgttgcaatgcatgcatggtctgaagggag

SEQ ID NO: 17851 - DNA, 86 bp, Zea mays
  Clone ID: LIB84-016-Q1-E1-A9
cacacgcgtccgggagaaggcggttgaagtgtaccagaggatgaagaaggagcgctgcagaactaacaccgagacctacaccctga

SEQ ID NO: 17852 - DNA, 299 bp, Zea mays
  Clone ID: LIB84-016-Q1-E1-B1
gcgcgacggaaaccccaaacccaacctcatctcttttctcggcctctaccgccccctcgatcggtcggccggtcagctatgacgccgggaagctcggccgccggatccggcgtcatcgttcctcggaacttcaggctcctagaagagcttgaacgtggagaaaagggcattggagatgggacagttagctatggaatggatgacgcagatgacatctacatgcgatcatggactgggactattagtggcccccataataccgtccatgaaggtcgcatctgacagctgaagttgttcct

SEQ ID NO: 17853 - DNA, 81 bp, Zea mays
  Clone ID: LIB84-016-Q1-E1-B11
tgcagatcctaataactttatgtgttgtgacaaaccacctctcattggacgacaaacatataccaaagttacaaggctaga

SEQ ID NO: 17854 - DNA, 81 bp, Zea mays
  Clone ID: LIB84-016-Q1-E1-B12
cagacgcgtgggcttgcccctgtggtcattggtgtttcaatggcatcccttactgagctttcattcaactggactggcttc

SEQ ID NO: 17855 - DNA, 424 bp, Zea mays
  Clone ID: LIB84-016-Q1-E1-B4
tcgacacacgcctccgggatatgtcaaagtaattctagcaacaaatcgtattgagagtcttgatccagccttgcttcgcccaggtcgaattgacagaaagattgaattccctttacctgatgtcaagactaggcggcgcatcttccagatacacacatcgaaaatgacactggctgatgatgtaaacctagaagagtttattatgtcaaaagatgagttttcaggtgctgacatcaaggccatttgtactgaagctggcttgcttgctttgagagagcggcggatgaaggtgacgcatgcagacttcaagaaggccaaagaaaaggttatgttcaagaataaagaaagggtgccggagggcttatatatgtgagactcatcagcagcgctattaggtcttagtgagagaactggcgtttgtaat

SEQ ID NO: 17856 - DNA, 412 bp, Zea mays
  Clone ID: LIB84-016-Q1-E1-B5
cccacgcgtccgaccggaattcctgcttcaatgtacctcttgcttgctgataaaagtcctgctgagactggagcagagatctgcataaactacggcaacaaaggaaatgaggaactactgtacctttatggatttgtggttgacaacaatcctgatgattatctcatggttcattatcctttggaagctcttagacagatccagtctgctgatataaaaatgaagctactagagatgcagaagggagaattgaggtgcctcctacccagaagtttgcttgataatggattttttggtatccgttctagtgaagataaggatagcaagaaaaatactggtccgttttcaagttttacttggagtggtcaacgcaaacttccatcatatcttccaaaaattgttttcgctcatg

SEQ ID NO: 17857 - DNA, 409 bp, Zea mays
  Clone ID: LIB84-016-Q1-E1-B7
gacctccgagaaccccgacctgtatgggccattttggacatgcaccaccctgattttcgttgctgcatctattgctacttttgtcacctacctatcccacaaatggcacaagaaggaatggaactatgatatcaacttggttacctggtctgctgggttattctatggctacgtgacatttgttcctcttcttttatatgttattctcaagtacttgtcagcacctgctggtttggtgcaattgtggtgcctatatggatattctctgttcatattcattccagcatcgcttctgtctattgtgccaatagaaatattcagatgggtgattgctggtgttgctggtttcatgtctgctactttcgttgctgtaaatccccgcgcacacattggtaattccggcgagcga

SEQ ID NO: 17858 - DNA, 414 bp, Zea mays
  Clone ID: LIB84-016-Q1-E1-B8
accacgcgtccgcccacgcgtccgggcatcatctctttctacggcggccactgctgcagcgatttcatttacagctggaactcactggaagaggaagaagacacctcgaagcaaacctgcgacagccagggtaacctcgtgctaactgggccatcaatggccacctcggcagaaagtccaattgccttcaccttctacctccatgatggcagcccgcaagccggagaagccgctgaggacgacgaggacatcgggaggataatctgcgactgcatcggcgacgacttctccaactacaacagggccatagtcgagactgtccaaatgggctatggcctcgctgaagtgatctatgccgtgctgaacaacggggtccaaggccgggtcgctgtcaaacttgctcgcctgccggtg

SEQ ID NO: 17859 - DNA, 84 bp, Zea mays
  Clone ID: LIB84-016-Q1-E1-B9
cccacgcgtccgcccagccagggtggtacagggtttattacatcattaataatattcaagagttagtaaccgctctgacccaag

SEQ ID NO: 17860 - DNA, 81 bp, Zea mays
  Clone ID: LIB84-016-Q1-E1-C10
aacgcttatatcttgtcagccatggcgaccgccgccacgtctaacctcctcaagtcctccttcgcgggctctcggctcccg

SEQ ID NO: 17861 - DNA, 104 bp, Zea mays
  Clone ID: LIB84-016-Q1-E1-C11
tcgcgggtcgacacaagcgtctaaacagacgttctggaacagattgcgctgctccataattacttgtgctctaagccttgatccaaatccacacacattgatct

SEQ ID NO: 17862 - DNA, 57 bp, Zea mays
  Clone ID: LIB84-016-Q1-E1-C12
ctccgcaaggtgaataatccagcactgcttatcaagtcctagatcttgactgtattg

SEQ ID NO: 17863 - DNA, 442 bp, Zea mays
  Clone ID: LIB84-016-Q1-E1-C2
actcgcgggtcgacacaagcctctagaatgagtcgtattacaactccgggatcttagagctgaggctggagcggccggaagtcaagaacgccattaattgggatatgatgaggatgctgcggagcgccatagagaagattcaggccgacacgacggcgaatgtcgtccttgttgcgagctccgtgccgggggctttctctgcaggcgccgatctcaaggaaaggaggctaatgagttcttctgaccttggggggtatgccagatccttgaggtctacattttcgtcttttgaggcacttcctattccaacaattgctgtcattgaacgagctgcccttggtggtgggctagaactggctttggcgttcgatcttcgaagatgtggagaaaatgctgaacttggactgccagaaacaaaccttgctattatacctggagctgg

SEQ ID NO: 17864 - DNA, 306 bp, Zea mays
  Clone ID: LIB84-016-Q1-E1-C3
cgtcgcaagcctctaaagtgatgtcatatctatctgaggcctaaggcctacgctgagaacttcaagtggagaggccctccgaaagcggagcaagcatgagctcgagacatctgtgatgctgacattggcacgatgtcgttttcctcctggctcgattttattttgctttcaaccgtgcccattgttaaagtacaaactagagtatgcatctatcaaacttgtaataagcatgatgtgcaatcaaacaaaatggtgtacttgtacttccaaaacgttaattcgtggatgacattgcatttgcaaaaa

SEQ ID NO: 17865 - DNA, 423 bp, Zea mays
  Clone ID: LIB84-016-Q1-E1-C4
cacacgcgtccggaagaaaaccaagatcgatgctccgtctgagctgtcgtcggcgggccgccctcaccggtcgttcctccctcatctcgtggctgccgagcatctaccgcctcggtctcaccccttcttcatcacacaccatgagagtgatgcatcaagaagagatcctagctgggcagcagcagcagcatggaaggtgaccgcagctgcacctcctcctcctaccaccaccctgttgccgttgccgctgccgtcgacgtcgtccgctgcagcatcatcaggattctccaataccgccacgacagctgccgccgccccatcggccgcctcctcccgccggttcgacccgccgccaccgtcgtcgtcctcgtcctcgagccatcagcagcaccaccaccgccgctgagaatcgaaggaagccac

SEQ ID NO: 17866 - DNA, 437 bp, Zea mays
  Clone ID: LIB84-016-Q1-E1-C5
ctcgtgggtcgacacaagcctctataatgagtcatattagcttgatgttggctcatcattgtgatcgctatgtaatacagcgaggggtgggacagtacattggtgaaagccttgagaagacacttgctaggtcaaggtgtcccaagggtcgtctgctgtactacttccccaaatcgtttagcaaacaggacgaagtttcgtcatggtgtggatggcatactgactatggatttttgacaggacttacatgtggcttgttcacgagaaaatcagaggaggtcccctgtcctgatattggaactgggctgtatgttcggactcgtgataatcaagtcgtcaaggtcacacttgtggatgatgagttggtctaccaaattggggagactgctgaaatactatcaagagggcatctatgtgcaaccccacactgtgtgaag

SEQ ID NO: 17867 - DNA, 383 bp, Zea mays
  Clone ID: LIB84-016-Q1-E1-C7
agacagcagatgcagtgttcgattgcattggtgacccgccagaagtgcgcttcgatttggatttctgcgccaagttgctcaagaaacaatatgtgagctgaaagggggctagtgcaagtgatataccaagtacgaggttcctgaatatggagaaagagtccatgatggcatgccaatgttggttcttcaagccatgacctgatactaggacttggaagtccacgttctacccaattgtaacttatagaatggcattcactactgcccacccagttggcagttgtaaatgtgttagtcattcaacaaactggaaaccactcgaataagggatcaccaagtccaaactcttcagtcaaagcaatagtaattgaggttacgagtcg

SEQ ID NO: 17868 - DNA, 82 bp, Zea mays
  Clone ID: LIB84-016-Q1-E1-C9
gtgaggatgcttcaaatggaagtggtgatgtgtgggacgaatcacttgaggctccattctgaatggcgtcttgctgcatgaa

SEQ ID NO: 17869 - DNA, 413 bp, Zea mays
  Clone ID: LIB84-016-Q1-E1-D1
ctgctaaaaggcatttgacacagcgcattgaaaagttggacgataaattggatcagcagaaggctctatctggacaaataagagatgatgtcactgatgcacgtctgaagcttgagaatattggttcagaaatcaagaacatcaaagaattggtttggggtctggatgggaaaattgattcaatggaagctaaacaggacttctcatgtgctggtgtgatgtacctctgccaattcatggagcaaaatggtggaaagcttccggatcgcctggaatgctccaaaatgacgacaaaacgttttggaggccaaaagttcttacagggattgcaactggcaatagaatcagggaattgtggcaatgacaccattgatatgctgttgaaagatgctgattcctctgatagaataaac

SEQ ID NO: 17870 - DNA, 71 bp, Zea mays
  Clone ID: LIB84-016-Q1-E1-D12
ataagttgtcagttgatccctctccaataagctaattaaaggccggtctcaaccccccttgaactcatttt

SEQ ID NO: 17871 - DNA, 393 bp, Zea mays
  Clone ID: LIB84-016-Q1-E1-D2
gtcgccgccatgcttccggcgagatggacgtggtgaaggcggcgcagttgtcggggcggacgctggaacgggtagtggtgcatcccttggtgctgctcagcatcgtcgaccactacaaccgcgtcgcccgcgacacccgcaagcgcgtcgtcggcgtcctcctcggcacctcatcccgcgggtccgtcgatgtcaccaactcctacgccgtgccgtttgaggaggatgacaaggatcctaggatctggttccttgaccacaattaccacgagtcaatgttctccatgttcaagaggattaatgccaaggagcatgttgttggctggtacagcactggcccagagctaacggagaacgacttggatgtccatgcattattcaacagttatgttc

SEQ ID NO: 17872 - DNA, 414 bp, Zea mays
  Clone ID: LIB84-016-Q1-E1-D3
gacccacgcctccggactcgttcgcggggttcggcccggggctagggctgggcggcggcggcctcgggatgtcggccgcggaagccgcgctggcgctggaggagcgcgagatgccgccctgcccacccggcctccgccagtacgagaccatggtcgtgctccgccccgacatgtccgaggaggagcgcctcgccttcatccagcgctacaaggagctgctcgtcgccggcggcgccatgtacgtggaggtcttcaaccgcggtgtcatcccgctggcatacatcatcaggaagaggaacagccgcaccgggctgccgtccacctactacgacggcatctacctcctcatcagctacttcagcaagccggagtccatgggacgccctgcagcttaagctcaatgccgaggacgac

SEQ ID NO: 17873 - DNA, 447 bp, Zea mays
  Clone ID: LIB84-016-Q1-E1-D4
actcgcgagtcgacacacgcctctacagtcactcgtgcgatcggcgtgccgcgtgcgtgaggtgatcggagcatcccgtcccgaggaggaagacaaccggcgacgcggggggaacatggggaagacgccggtgcggatgaaggcggtcgtgtacgcgctgtcgcccttccagcagaaggtaatgccggggctgtggaaggacatcaccaccaagatccaccacaaggtcaccgagaactggatctccgccacgctcctcctcacccccgtcgtcggcacctaccaatacgccatgtggtacaaggagcacgagaagctttcccacagatattaaatgcgctgcccttgacagacagcactcggagttttcatgatgggtttcataatcctcccatgatgattttacacttgtttgatcaatttcagttcaacgccttttccacgttc

SEQ ID NO: 17874 - DNA, 435 bp, Zea mays
  Clone ID: LIB84-016-Q1-E1-D5
ctcgcgggtcgacacaagcctctagactgactcctattacgatgcctttgtagcgctgctgcctcgccgcgtcgtcgcgggtccccgatttccgcttgctgctgcgcttccaacaccatggacggcgggggatccggcaatgcctccggcggcagcggcggcgcatcgacgtgctgctactacgcgctcctcggcatccgcaagaacgcctccgccaccgacatacgcgccgcttaccggaggctcgcgatgaagtggcacccggaccggtgggccagcgaccccggcgcggccggcgaggccaatcagcggttccagcggatccaggaggcatactccgttctgtcggacaaggggaagaaggccatgtacgacgccgggctcttcgaccccctcgacgacgacgaccaggatttccccgacttcatgcaggag

SEQ ID NO: 17875 - DNA, 412 bp, Zea mays
  Clone ID: LIB84-016-Q1-E1-D6
aggacgactgccgcgccgactaccgcaacgtcatggccgctgccgtgcgcggcgactacgacacgtgcggcctgtacgccgaccagctgaagcggcggtccgcggagctgttcaaggagggtgtccttggcctggagcacctcgccgcggtggacgccttctgcgagctcgtcgcccgcggcatgggcgcgcccgagccgccgcgcacctaccacatcaacctgtccgtgttcacctccctgccggacatgtgggccatcgggcagcagttccccatcatcccgatccagcggctgcaggagcggcccgccgtcgacggcgtgctctcggacctcacctgcgacagcgacggcaaggtgagcgagttcatcggcgggagggacagcctgccggctgcacgagctgcccaccc

SEQ ID NO: 17876 - DNA, 411 bp, Zea mays
  Clone ID: LIB84-016-Q1-E1-D7
acccgccctacgacctgacgtccttccggttcagccccatcaaggagtccatcgtgtcccgcgagatgacccgtcgctacatgacggacatgatcacctacgccgacaccgacgtcgtcatcgtgggcgccggctccgcggggctgtcctgcgcgtacgagctctccaaggaccccgccgtgagcatcgccatcgtggagcagtcggtgtcgccgggcggcggcgcgtggctgggcgggcagctgttctcggccatggtggtgcgcaagccggcgcacctgttcctggacgagctgggcgtggcgtacgacgaggccgaggactacgtggtcatcaagcacgccgcgctcttcacgtccacggtcatgagcctgctcctggcgcgccccaacgtgaagctgttcaacgccg

SEQ ID NO: 17877 - DNA, 413 bp, Zea mays
  Clone ID: LIB84-016-Q1-E1-D8
agatcggtggttccaaccggcaaaagagagatgatggtagggaagagggagcgggactgcaagaacccgatgcggcggacgacgagcatgacggagttcgcgccgcccgacgcgctcgcggcggtgatggaggacgaggagggcccccagctgtccgacgacagcagccgtgacggcgggcagcacgactggctgtccgcgctcggcggcggcggcggcggcgtcgggggcgccgcggcgcaggaggactggctcgcggcgtaccacgcccgcgcggcgccggcgcgggcggggctccgccggaactcggccgactactccgccgtcgagaccgccgcgttcctgcgcgcctgcgggctctgccggggccgcctcgggcccgggcgagacaccttcatggtgacgggcgacgc

SEQ ID NO: 17878 - DNA, 82 bp, Zea mays
  Clone ID: LIB84-016-Q1-E1-D9
gcgagggcgcgtcatcgtgcgcatgctctccccgatgtcgcacttcgagaacgggacctgggaccacggcggcgactgcagg

SEQ ID NO: 17879 - DNA, 81 bp, Zea mays
  Clone ID: LIB84-016-Q1-E1-E10
cccacgcgtccgcaacacaataatgtaacaagcatcagcccagcccagccagcttccattcccaaggaaaccctccgctcc

SEQ ID NO: 17880 - DNA, 77 bp, Zea mays
  Clone ID: LIB84-016-Q1-E1-E11
cacacgcgtccgcacaacagtaatgtgacacgtatcaccgcaggccagggaccttccattcgcaaggaatccctctt

SEQ ID NO: 17881 - DNA, 80 bp, Zea mays
  Clone ID: LIB84-016-Q1-E1-E12
aaaacatcttcgacgctaaagccgggattgccctgaacgaccacttcatcaagctcgtctcttggtattacaacgagtgg

SEQ ID NO: 17882 - DNA, 379 bp, Zea mays
  Clone ID: LIB84-016-Q1-E1-E2
caattcgattctggagacttctcaaaagtcgtggaatacatcaacaaaattgtgctggttttttctccaggttgcttaaaggcaaagcttctcaaggctaaagcattgctagcactgaaagactactcaagtgttatttcagagaccggattcattctaaaggaagatgaagacaatttggatgcactgctattacgtggtcgtgcctactattaccttgctgatcatgatgtggcctccaggcactaccagaaagggcttcgtcttgatccagagcattccgaattgaagaaagcatatttcgggttaaaaaatcttttgaagaagagcaagagtgcagaagataatgctgccaacggtaagctacgtgtgtctgttg

SEQ ID NO: 17883 - DNA, 416 bp, Zea mays
  Clone ID: LIB84-016-Q1-E1-E3
gggggcttggccatcaatcgcttgacgagcgagcgagcgagtccatcgccaagctggggagctttaacctgccgaagagcgtgtgggttcagtcgtctttcctccctctccatctgtaggtctgccgtcgccgcctcgtgcagtgttcgtgtgccctgccgctgttctgcactagttctacccgtcatttccacccttccgcttgctggccgagtcccgcgcgcgtgcaggtctttccgcaatctcaccgggtggcgggtgcttccttccttcctcgccgaccctgtggctttgcaacgaggaaggtgaaatttgaatggaaatcgcgacgggagcgataagcgcactcctgcccaagctgggcaaccttctcaaagaggagtacaagctccagaggagcgtcagggatgatatca

SEQ ID NO: 17884 - DNA, 414 bp, Zea mays
  Clone ID: LIB84-016-Q1-E1-E4
gcatcctcaaggagctgaaggacctgcagaaagacccccccacatcatgcagtgcaggtcctgctggtgaggacatgtttcattggcaagcaacaattatgggaccacctgacagtccctatgctggtggtgttttcttagtgaacattcatttcccgccagattaccccttcaaacctccaaaggtttctttcaagacaaaggtcttccatcctaatatcaacagcaatggaagtatatgccttgacattctcaaagagcagtggagccctgctttgacaatttctaaggtcctgctctccatctgctccctgctgaccgaccccaacccggacgaccctcttgtcccggagattgcccacatgtacaagacggaccggccgaagtacgagtcgacggcccgcagctggacgc

SEQ ID NO: 17885 - DNA, 432 bp, Zea mays
  Clone ID: LIB84-016-Q1-E1-E5
ctcgcgggtcgacacaagcctctaaacagacttctattatgaacgaaacaagtactgtctgagctccaagataccccttggagtagttttggcaatcccgccgttcaactatcctgtcaacttagcagtttctaagattggcccagcactaattgcaggcaatgctcttgtgctaaagcctccaactcagggcgctgtggctgcacttcatatggtacactgcttccacctggctggtttcccgaaaggtttgatcagttgtgtgactgggaagggttctgaaataggagattttcttacaatgcatcctggagtcaactgcataagttttactggtggcgatactggtatagccatttcaaagaaggctggaatggtccctcttcagatggagcttgggggaaaagatgcttgcattgtgctagaggatgc

SEQ ID NO: 17886 - DNA, 408 bp, Zea mays
  Clone ID: LIB84-016-Q1-E1-E7
aacacgcgtccgcggacgcgtgggcggacgcgtgggggtccatcagccctgatgctgatggaaacaaaggcttggtctcgtactgagatgtaacgccacaacgatttacatgcgccaagaaccatctttcttgctagtttagcgttatgtacgcttttgtaatggcttctaaacttgtttttttgatgtagctgtacatttggatgtcctgttagacgtgagatgtgttttacgtcagatatttagaactacttctgagtcagtataacgcgaatagtgctatgcgttcttaggtcgaggcatgaatgttcgagtgtggttttgggtaaaactgaaacgtgttggtcatctctgttcaacagactttctgttgaaaacggctgagcatggtgatatacatgtacgcaa

SEQ ID NO: 17887 - DNA, 415 bp, Zea mays
  Clone ID: LIB84-016-Q1-E1-E8
aaataatgttcggaaagttatcgtggtttcatccacagctgctgtccattttaatccgagttggccccaaggtataatccaagacgagagttgctggtcagataaatttttttgcactaagagtgaggaatggtacattgctgccaagacaattgctgaatatacagcactggagtatggagagaagaatgggctactcgttgttacagtttgcccttgtgtcgttttaggtcgactcctgcagcctctaatcaacaccacgagtgaagtattcgtctacattataaaaggaggtcctagaacgatgagtaacatcacctggaacagcgttgatgtccgttatgtaaccgatgctttgcttttggtatatgggaaagtggaagcatctgggagagtcattttgggcagcaaatcg

SEQ ID NO: 17888 - DNA, 81 bp, Zea mays
  Clone ID: LIB84-016-Q1-E1-E9
cagacgcgtgggggcctcaacaaggtcgccgggaaggtcttcaggatcggccatctcggcaacctcaacgagctgcaactt

SEQ ID NO: 17889 - DNA, 83 bp, Zea mays
  Clone ID: LIB84-016-Q1-E1-F10
gacggcgctgaccacacgccgccgagtccggcgaaacaaccgcctgtagttccagagtagtacctcatggcggccatatcgtc

SEQ ID NO: 17890 - DNA, 102 bp, Zea mays
  Clone ID: LIB84-016-Q1-E1-F11
tcgtgggtccacacaagcctctaaaggaagtcttactagtgacatttgggcaacctcggattggcaatgctatatttgcatctaatttcagaagatatttgc

SEQ ID NO: 17891 - DNA, 83 bp, Zea mays
  Clone ID: LIB84-016-Q1-E1-F12
atctgatgtggtcatggcgattgttgcggacgtcatgcttgtctatcttcctgctccaactattggtttacagccgccactgg

SEQ ID NO: 17892 - DNA, 322 bp, Zea mays
  Clone ID: LIB84-016-Q1-E1-F2
gaggcgaacgacaagccagcggcggcgtccgggagcccgtggtacggccccgaccgcgtgctgtacctgggcccactgtccggcgagccaccgagctacctgacgggcgagttcccgggcgactacggctgggacaccgcggggctgtctgcggacccggagacgttcgccaagaaccgggagctggaggtgatccactcccgctgggccaagctgggcgcgctcgggtgcctcttccccgagctgctcgcccgcaacggcgtcaagttccggcaagccgtgtggttcaaaggccgctcccagattttcaaccaggggcggc

SEQ ID NO: 17893 - DNA, 417 bp, Zea mays
  Clone ID: LIB84-016-Q1-E1-F3
aacacgcgtcagcttgagcgtgtcaatgaagtcaggcagtctgccggtttgcaacagctcgaggaggatatcgcttcgcttgagaacaagtccagtgatagttccttatgggatgatccttccaaggcacaggggatacttgtttctctgacagaggtcaaagacaaagtgaagcttctcaacgatttcaagttacagattgaagaagcagagactattgtgaagcttacagaagaattagattctatagatactggtcttcttgaggaggcctcaaagattataaaggcattaaataaggcattagacaactttgagatgacacagcttctttctggaccatatgataaggaaggtgctgtaattaatatttctgctggcgctggtggcactgacgctcaggattgggctgacatg

SEQ ID NO: 17894 - DNA, 419 bp, Zea mays
  Clone ID: LIB84-016-Q1-E1-F4
gcgcggtgccagctggccgtgctgctcaggcgggaggtggccagcgagcgcaccgcgtcggagcgcccggagctgcactggggcctcttcagccaggccaagaagggcgaggacttcaccttcctcaagcccgaatgcgagcgcgtccctgacgtcccgtcctcctccttctccgccttcggcctgtttgatgggcataatgggaacggagccgcaatttacaccaaggagaatctcttgaacaacatcttgagtgcggtcccagccgatctgaacagggaagactggcttgctgcactcccaagagcgctggttgctgcattcgtcaaaaccgataaggatttccagactaaagcacgttcttcagggacaactgtgacatttgtcataatagatggattggtcatcactgttgcatc

SEQ ID NO: 17895 - DNA, 415 bp, Zea mays
  Clone ID: LIB84-016-Q1-E1-F6
attgcagatcgtgtatgagctgttcttgaggttcattcagtctcccgagacagacgcgaagctggccaagagatacattgaccacggattcattatcaggcttcttgatctctttgactcggaggatcctagggagagggagtacctgaagacgatccttcacaggatatacggcaagttcatggtgcatcgccccttcatcaggaaggcgatcaacaatatcttctaccggtttatattcgagacggagaagcataatggtatcgcagagctgttacagattctggggagtataattaatggctttgctttgccgctcaaggaagagcacaaattgtttctagtccgagcgctgattccgctccacaaaccaaaatgtgttgccatgtaccatcagcaactgtcctactgcgtc

SEQ ID NO: 17896 - DNA, 410 bp, Zea mays
  Clone ID: LIB84-016-Q1-E1-F7
cacacgcgtctgacacggttctccctcgctccagatctcccttcgcagccggccagggaccccttcacagcgcgggagatggctgatcaggaggccccagttgcagttgaggcaccaaccccagttcttggagagccaatggacttgatgactgcgctgcagctggtgatgaagaagtcaagtgctcatgatggacttgtgaagggtcttcgcgaggctgccaaggccattgagaagcatgctgctcagctttgcgttcttgctgaggactgtgaccagccagattatgtcaagctggtgaaggcgctctgtgctgaacacaatgttcaccttgtcactgttcctgctgctaagactcttggcgagtgggctgggctttgcaagattgactccgagggcaaggcaaggaa

SEQ ID NO: 17897 - DNA, 208 bp, Zea mays
  Clone ID: LIB84-016-Q1-E1-F8
cgggtccacaacaacgtccaaacacgcgtccgggagacactgccatgaggactctactaccggtggccgccggccgcgagaccgtcgcctgcgcggatacacgcgtctcccagaggtcactgcgcctctcaggcgcagccgcaagtacggcgctgcagccggatcgagttgctggaggtagagccgtttaggctgagcaagaacgagg

SEQ ID NO: 17898 - DNA, 79 bp, Zea mays
  Clone ID: LIB84-016-Q1-E1-F9
cactgccgaccatcctggtgatcgagttcgtggccatcgccttcgccgagcaccagcgcaccatggagaaggaccccga

SEQ ID NO: 17899 - DNA, 357 bp, Zea mays
  Clone ID: LIB84-016-Q1-E1-G1
acacaagcctccaaaatgactcaaagtatgtacacgatgacctgcatgtgttccttcgtaccgatacccagggaaacaaatacttggctgtgagcattacaaaagcaactgcaagcttgttgctgcatgctgcaataagctattcagttgcagactctgtcacgataaagtaactcaagaggtccacttactcactcgtatgaccatgtaattggtgttaacacaattacattaacatgtaaaggttggtaaatctggaaggtcttgatggtctaatacctagctaggagtatggaagagaagggcggagaaaatctgtctctgaagcatcgcacctgaataaaaatcatccaattc

SEQ ID NO: 17900 - DNA, 85 bp, Zea mays
  Clone ID: LIB84-016-Q1-E1-G10
aaaatgcgtctgcccagtgtcgtgtagtgtgtagtcgcagcagctagcgcccggccggccagtcgagtgagtccatcctccatcg

SEQ ID NO: 17901 - DNA, 102 bp, Zea mays
  Clone ID: LIB84-016-Q1-E1-G11
tcgcgggtccacacaagcctctaaactgattcatactagtctcggctgctatggcggcggagaagaacgccgatgtgcaggtagtcgacttcgtccacgatg

SEQ ID NO: 17902 - DNA, 422 bp, Zea mays
  Clone ID: LIB84-016-Q1-E1-G4
agcacgaccacactacccacccacctccactactgaccgattcccagaaagctcgatctagcgcgcgcggctgcagagtgcagacgacgacgtacaccatggcgcggcggtccctggccctgctgctcgcgtcgtcgctcgccctcatgtcggccgccgtcgcatcggcggactcgtggctctacgacaagttcaacacggacggcaccgtccgcacccagtacgacgcgtcggggcaggaggtggcgatgctcagcctggaccgcagctccggcgccggcttcaactccaaggagcagtacctgtacggcgagttcagcgtccagatgaagctcatccccggcaactccgccggcaccgtctcgtgcttctacctctcgtcgggcgacggcgacgggcacgacgagatcgacattgagttc

SEQ ID NO: 17903 - DNA, 426 bp, Zea mays
  Clone ID: LIB84-016-Q1-E1-G5
cgccctcctcgtgcgaacgctgccgctcggggctcagcagctccgcggtgggcgcgcttccggcggtccggttcggcgacggtgacgtcgacgtgggccgcgccaccgagtgcgcggtgtgcctgggcgccttcgacgccgccgagctgctccgcgtcctgcccgcctgccgccacgccttccacgccgagtgcatcgacacctggctgctggcgcactccacgtgccccgtctgccgccgccgcgtcaccgggggccacgtggacgactccgagccggaggactcggcggcgacgcggcagcacggccggcgctcggcggacgacgcggaggtacaagtggttgtgcaccgcgcgtgggaccagcggtagtccaccgaaggcttggtgggccgggccgcgtacctcgaggccgccaggcatcgga

SEQ ID NO: 17904 - DNA, 412 bp, Zea mays
  Clone ID: LIB84-016-Q1-E1-G6
aggacgcgtggggcaccgaccagcaatggccacgttcctgggaagctcaccggcgctcctcgcccgtcccatcgccaagccccacatctcctgcgcgcagacaccgcgcccgccaagcgcccagaaccagccgccgtccagcgagcaaccgcaagcacaaacacagcagcagtccgtgcaagcgcagccacagcaggcggcggcgaggccgaagcgcgcgggcggcgcggactccacggactgggtggcctcgtcgctgacgcggcggttcgggatcggcgcggggctggcgtgggccggctttctggccgtcggcgtcgtgtccgagcagctcaagacccgcttcgaggtcgcgcagcagcaggccagcagcaacgacgtgggacaggagcaggacgtcgtcctgcccaac

SEQ ID NO: 17905 - DNA, 411 bp, Zea mays
  Clone ID: LIB84-016-Q1-E1-G7
ggcacggcgacaagaaggacgagccgtggtggcccgtgctggacacccgcgacagcctggtggagacgctgaccaccatcatgtgggtcacctccggccaccactcggccgtcaacttcggccagtaccacttcgccggctacttccccaaccggccgaccaccatccggaagaacatgccggtggaggagggcgggccgggcgaggagatggagaagttcctcaagcagccggagacgacgctgctggacatgctgcccacgcagatgcaggccatcaaggtcatgacgacgctggacatcctctcgtcgcactcgcccgacgaggagtacatgggggagttcgcggagccgtcgtggctggcggagcccatggtgaaggcggcgttcgagaagttcggcggcaggatga

SEQ ID NO: 17906 - DNA, 100 bp, Zea mays
  Clone ID: LIB84-016-Q1-E1-G9
gttggtcctcacaattctctagactgagtcataggacccgttgagaacctcgccgaccacctcgctgaccctgtcaacaacaacgcctgggcctacgcta

SEQ ID NO: 17907 - DNA, 418 bp, Zea mays
  Clone ID: LIB84-016-Q1-E1-H1
cacacgcgtcagcccacgcgtccggtgttgtggcaacacatcgtcgtgatatagccatacattacaagattactgggataacctcacttcccttgaatagtttaacgtatctattcagttttaattgatattctttttcttaattcatgctgcactgttttttaatggcacatgtttaaatattcatgtttgtttatataggtttaatcaagatggggcaagtgtttcagttgtccaatactttaaacaccaatataattacagtttgaaacacattaactggccatgccttcaatctggcaatgatagcaggccgacttatttaccaatggaggtttgcagtatacttgacggtcaacgctattctaggaagctaaatgagcgccaagtcacaagcatcctgaagatggcatgtgag

SEQ ID NO: 17908 - DNA, 84 bp, Zea mays
  Clone ID: LIB84-016-Q1-E1-H10
ggaaaggtcatgctgaacctgctaagaagattggggcaggagtcgaagcatttgagataggcaaccacccggtgtggaaaagtc

SEQ ID NO: 17909 - DNA, 105 bp, Zea mays
  Clone ID: LIB84-016-Q1-E1-H12
gcgggtcgacacaagcctctacacagacttctagcagcacgttccccagagcttctattcctggccattcgccgtcgacgtcggcggagaggtgttcgatccggg

SEQ ID NO: 17910 - DNA, 458 bp, Zea mays
  Clone ID: LIB84-016-Q1-E1-H2
aaacacgcgttcacgaacagaccaagaaccggcataaccaagaatgttgcagactacgcgcgctggagacggcgaagggaagctcaatccgtagcgtctggcttagcatgctctgtgcgtcgcgcgcctggctgtgacagcgcaggattccagccgcgtaccgtcccaaggatccgccggcacgccagggcggcccggccggtgacgggcgaccagcgacgagtgctcagcggaccgcaggtacgctggcctatctggaaaccggcgtcccgagggagaatgccaagcacaggctcgtctttgtccatgggttcgactcctgcagacacgacgcgcttccgatctccacggagcttgcgcaagagctgggcgtttacatgttgtccttcgatcgccccgggtacgccgagagcgaccgcacccgggcaggacccaggagagcatcccgctcgacatcg

SEQ ID NO: 17911 - DNA, 439 bp, Zea mays
  Clone ID: LIB84-016-Q1-E1-H3
ctcgcgagtccacacaagcctctagagggactcatatcaccacaaacagaaactaaagcaagtgttggatttaaagctggtgttaaggattataaattgacttactacaccccggagtacgaaaccaaggatactgatatcttggcagcattccgagtaactcctcagctcggggttccgcctgaagaagcaggagctgcagtagctgcggaatcttctactggtacatggacaactgtttggactgatggacttaccagtcttgatcgttacaaaggacgatgctatcacatcgagcccgttcctggggacccagatcaatatatctgttatgtagcttatccattagacctatttgaagagggttctgttactaacatgtttacgtccattgtgggtaacgtatttggtttcaaagccttacgcgctcaacgtttgg

SEQ ID NO: 17912 - DNA, 404 bp, Zea mays
  Clone ID: LIB84-016-Q1-E1-H4
aacgcgaaaaacatgaaacgtgagcgagagcgtgcgtgcagcattctccgtatccctttatttatctcatataaaaagtagggaacactaccacatataagttgattttcttctatctaaatgtataatatgggattaaagactgataatgccataccatcttcacacaccacatttactttcttattgaattggaccacaaactaatgacttaattccacgggtagggcctctcttcctccctcttgtaggctgtattagcttagtctagatcgaatcagctttcggctttgggtcgctcacgtcaccggccggccaccatcgctacgacagactcactcccaaacgggctgaggctgctgggcgtaatcctttaaggagacgaaaggcatcttcccgccaag

SEQ ID NO: 17913 - DNA, 411 bp, Zea mays
  Clone ID: LIB84-016-Q1-E1-H5
atccaacaatggaagttctattgtagtgatgtcaaaaggcacaccatatacacagcaatcttataaagtcagtgattcctttccatttaagtggataaacaagaaatggaaagaaggttttcatgtgactgcaatggcaacatcaggcaatcgatgggctatagtcatgtcccgcagtgctggattttctgagcaggttgtggagttggacttcttgtacccgagcgagggcatccatagacgctgggacaatggcttccgtattactgcaatggctgccacgatggatcagtctgcgctgatcctaagcaagccaaggcgtcgcccaagagacgagacacaagagactctgcggactacacagtttcccagtcaacatgtcaaggacaagtgggccaagaatctctacct

SEQ ID NO: 17914 - DNA, 381 bp, Zea mays
  Clone ID: LIB84-016-Q1-E1-H6
atgtggtgttcctagtcatgtgcttgactataaccctgttcttcgccaaggaagtgccctacagaggaaaccagaacctccccacaaaggcaaacggcgaggtcgagactgaaccttccggcccactcgctgtgctcaagggcttcaagaacttgcccacggggatgccgtccgtgctcctcgtaactggactcacctggctctcttggttcccgttcatcctctacgacaccgactggatgggccgtgagatctaccacggcgaccccaagggtagcaacgctcagatctcggcgttcgacgaaggcgtcagagttggctcgttcgggctgctgttcaaatccttcgttcgttaagagtcctcagctgcaatacatcact

SEQ ID NO: 17915 - DNA, 411 bp, Zea mays
  Clone ID: LIB84-016-Q1-E1-H7
cagacgcgtgggctcatccgtcgccccacggaagtttcggcggcgccggcgtgctcgtgatctcaaccaaggcgtgtctccgctccggtcacccgtcactccacgcaaacatgtcgaggaggaagaccagggagcccaaggaggagaacgtcacccttggacccactgtccgtgaaggagagtatgtctttggtgtcgctcacatctttgcatccttcaatgacaccttcattcatatcactgatttgtctgggagggaaactctggttcggatcaccggtggcatgaaggtgaaggctgaccgtgacgagtcgtcaccttacgctgctatgcttgctgctcaagacgtcgcacagcgctgcaaggagcttggcattactgcactgcacattaagcttcgtgccaccggag

SEQ ID NO: 17916 - DNA, 230 bp, Zea mays
  Clone ID: LIB84-016-Q1-E1-H8
aaggtgcttagcattggcaaaagtagcagagtcacttgagcttccctgtaagtactgctctttagggtgcccagagatcgtcccatactagagcaagataaatcacgaagcacagtgcagcttcaggccatatacctgcccctatgctggttctgaatgtgctgtggctggtgatattccattccgtgttgcacatttgacggatgatcacaaagtcgatatgcacagcg

SEQ ID NO: 17917 - DNA, 380 bp, Zea mays
  Clone ID: LIB84-017-Q1-E1-A1
gggcaaggtcgttttctctctagacatgtacatcaagtcattttggacgtcattgatagagcaatgggtgcattttctgctactggaatgaaccctgatagtgtccttccgggcgacgattggttcatggaggtctcccaagaagttgtcagcatcatcagtggaaggggtagagttgctaatggtgacagggaagcaaacagcccaacggcctcggtttcagcgcactcaatttcttcgttcagatcccatggcagctcctagtttgcaagttggtactttttttttggtaatcagatcactgtataataatcgatagtatattcttccaacctattcctccactcatttgttttttcctttcctttttcaaaaatttt

SEQ ID NO: 17918 - DNA, 406 bp, Zea mays
  Clone ID: LIB84-017-Q1-E1-A10
cggacgcgtggggcgattcacaaggccaatattatgaggaagacagatggtcttttcctcaagtgttgccgtgaagtggctgagacgtaccctgaaattcaatacgaggaggtcattattgacaattgttgtatgacgcttgtgaagaatcctggtctttttgatgtattagtgatgccaaacctctatggtgacattattagcgatctatgtgctggtttgattgggggcttgggcctaacacccagttgcaatattggtgaaggtggcatttgtctagcataagctgttcatggttctgctcctgatattgctggcaagaaccttgcgaacccgactgctcttaagctgagtgctgtcatgatgttgcgccacttgcaattcaacgacaaagcaaaccggattc

SEQ ID NO: 17919 - DNA, 415 bp, Zea mays
  Clone ID: LIB84-017-Q1-E1-A2
cagcgccactgtccagtgcgcgcgtcaagcttgcttagctagccgccatggcctccctcgccgccgtctccgtgaagcccgtggccatcaagggtctcgccggcagctccatctccggaaggaagctcgccgtcgccaggccgtcggcccgctccatccgcaggccccgcgcagccgccgtggtggccaagtacggcgacaagagcgtctactttgacctcgacgacatcggcaacaccaccggacagtgggacctctacggctctgacgcgccctcgccctacaacccgctacagagcaagttcttcgagacgttcgcggctccgttcaccaagagaggtctgctgctcaagttcctgctgctgggcggcggctcacttctgggctacgtcagcgcgtccgcgtcaccggacct

SEQ ID NO: 17920 - DNA, 380 bp, Zea mays
  Clone ID: LIB84-017-Q1-E1-A3
gagacatatatactggctggtacatgagaagataaaagagagtcaagtcaatttcaagtacttttgtgactttttcaaatgttggggaacttgaagcgaacgatttttatgaagatactctttatgaggatcaccttacgtagttgtatacaagaaacttggacactagagcctgggcatcttactgctttttgcaacacttgcttctcttctgatggaatgtttgtaagttgttgactgtgcttcgctgagaaccatagagggcacagtgaatatttgaatttgatgggagcctcgaggatttgcctttgtagagtttgttgatccttacgatgcctctgaagcccagtatcacatgaatcgccaagttttctttggtc

SEQ ID NO: 17921 - DNA, 251 bp, Zea mays
  Clone ID: LIB84-017-Q1-E1-A4
aaacatctctgcttcacacaaccatgctgcttttgttacggagtctggggaggttttcacctgtggtgaaaattcaacattatgctgtgggccaggggaaatttgggaaaactaaaattccagcaaatgcaaggttgaaacccctaaaaggaatccccgcaaacaaggttgcaatgggccaaattttaacgggaatcctaaaaaggaatggcaaatataaaactttgggaacaattcacaagggcaaattt

SEQ ID NO: 17922 - DNA, 273 bp, Zea mays
  Clone ID: LIB84-017-Q1-E1-A5
attttattgggcgtgaacttttagtgccaatataatacagcaatatctttagaaatttaattcaaaaacaaatgaagtgtaaaaatattgctgtattttattgggcgtgaacttttagtggcaataatgggggtaaaataagttcccaataaaatgggcccccaatggtccgaaggcaatttgcaatccggaatgtaatccaaacacagaaaatttggtttggttaatttgaaccatctcaaggggcaatcacagaaaaaagaaagagcgaag

SEQ ID NO: 17923 - DNA, 186 bp, Zea mays
  Clone ID: LIB84-017-Q1-E1-A6
tgctgtatcacggttgagccgtcatacccgttgatggagggcgccactccgccgaaccctggcgccagcccgccgtccccgactccggcgcccgccgtgtggcataactactactcgtgccctgacaggaacatctgctgccgcatttacgattacggtagctactgcttcgcctgaggctgtcgc

SEQ ID NO: 17924 - DNA, 401 bp, Zea mays
  Clone ID: LIB84-017-Q1-E1-A7
gctgttcgaagatcgagtttttatgtatgcctccacgaactcggccaaattcctagcattgctgatcgtggttccgtgggtgatagattttctagtgcacgactatgccatgatgccctttttagagaggtatgtccagaaggtgccgcttgcagctgagttacttgatgtgaggcgcagccagaagctgcagatggttaaggacctgaacatcgagaaggcaagataccgtcttgaagtagagatcggcaaatctcccccgctctctgatgaggaggtctggtttgagctgcgggaaaaagcgctcgagttgagggacgattggaggctagaaaaccgacaagcttttgcaaatgtatggtccgacatggtttatggggttgttctattcctgcttctct

SEQ ID NO: 17925 - DNA, 397 bp, Zea mays
  Clone ID: LIB84-017-Q1-E1-A8
caaacatctgagtctagctcctgacagtcacagacctcaaaactgttctgcacatcctttcttttgcagttgcagacttgcagcccaggtgcatgttgtccagagataagcaggtgatggctgcgccgatggccgcggcggacggcgggctgaggcggctgttcgagaagtcgctgccggagaacccgacgctgctggaggcgctctcggcgtggaaccgcaacgtgcaccaccccagcagcaagccgcccattgacacggcgtccttcacggagatcttcggcgagctccatttccaggagaagcagcagcccgaccgaggcgccctcctgccgccgtcgccgtcgaccccgccgacgccgctccctccttcccgcacgctgtcgtggctcgacat

SEQ ID NO: 17926 - DNA, 357 bp, Zea mays
  Clone ID: LIB84-017-Q1-E1-B10
accacgcgtccgcggacgcctaggcggacgcgtgggtttggacaagtgtgccatgatcagttgccaatagatcggcacagtgggcgatgcaaaagttttggttttgtacagtttgcacgtcatcaagatgcacatgctgtccagagtttaagtgggcaacttgacattgctggtagagtaatcaaggtttcacctgtgacacagcagccatgcattcaactaagtggaagcacaggagatttgggtcatgataaatcttgatgcgtggcacagaatgccagttccagagctcgtcgaatgcagaaattgcgccgcaatggcattacgaccactttgactggtgggaagggcagtgct

SEQ ID NO: 17927 - DNA, 388 bp, Zea mays
  Clone ID: LIB84-017-Q1-E1-B11
cggacgcgtggggcctcagccaccgaccgttgcaccagctcgcatggcgctccacgccgtctcccccgcggcggtctcctccccgctacgcgccctctcgcgcagcctcccccagcgctcaggctgtggttgtttaccaaagcagtccgtcacgatttgctcctctacgaactttgcgagaaaacttcaggatggaccagtggactttgctgctaggcgactggttcttggacactcggacaagagagcagttctgacgcatgccactattgaagaaattgaagcggagaaatccctcatcgaagaccaagctaaagaaaagatggagaaggcgatcgaaacagtccaaactaacttcaacactgtgaggacagggcgtgcaagcccg

SEQ ID NO: 17928 - DNA, 274 bp, Zea mays
  Clone ID: LIB84-017-Q1-E1-B12
cacatgcgtcagctgacggatccggggtcgcataggcggaagttggacacagagaagggaggtgatatgaccggactgtcgaagcaggaaaggcgtagcaccaccactgcaatgaagctcatgccatgtttcgtggatgcttcatcagggtcacattttaactcatgggctgttgacataaccacgggtgctaaacatgcaattgcaatgtcaattttagttcacgatcgttgttgcatcgatcaacgcatatgttgtctgcgatgctagtgtg

SEQ ID NO: 17929 - DNA, 414 bp, Zea mays
  unsure (1)..(414): unsure at all n locations; Clone ID: LIB84-017-Q1-E1-B2
gtgacacctatagctcgtgatgggcttttgaggacaatttgtggaagctcttcatctcctggcggttatgcttctctagcgcaagctaatacctcccaaaccaatggagtttctgccccaggtgtcactcctaagggctatgaatctgctgtaccaagcttgtcacttggaaattccgaaagtacaggcgtgaaacaagtaaattctgcaccaagaatgacacctgaaggccagaagttcctttcgctgggtattgcgccacgaagcccagcactgcgtgatttagtaaaatgccaggccagttcgacactcgttgccatgcctccagcgggcctgggaaaatcacggtccatgaagatcganggccatgattctctggcaccgagtgtgaaggagcaaaaaggaatggtggtc

SEQ ID NO: 17930 - DNA, 368 bp, Zea mays
  Clone ID: LIB84-017-Q1-E1-B3
accagctatgaacaaggcttcgtctcaatggaaggcaaaacaaggtagctcacgtgctgtttcgtcgccatcttgctcgtcctgggtcttgtccttgagtcacaccaggctgaacctggaggcaaatggtgctgcgaaacctccaccggaaaataccattttaatcgctgcgttgactcgggtttggtcgaaaatattgggttctgtgcgggtaatgccggttgcatcattatgggagacagatgtagaggccgttggacggtgcctgctcgtgatgcgctttccctggatgtcatttgattaagtacaagcaattacgtttagaaatgacggccaaactactgtcgtccaacgattggttatttgtg

SEQ ID NO: 17931 - DNA, 380 bp, Zea mays
  Clone ID: LIB84-017-Q1-E1-B4
gtctatacggccaggccacacgcaccaagaacagaaaaggttgtaggcatagggtttcaacctgggtttgatccttacaagattgtaagcgcatctcaagctggagacattcagtttcttgatgttagaaggtcagcagaaccctacctgactattgaggcacacaggggttcacttacagcattggcggttcaccggcatgccccagttgttgctagtggctcagccaagcagatgattaaagtgtttagtcttgaaggagagcagttgacaataattcgctaccagccatcttttatgggccaaagaatatgcactgtgaactgcctttcttttcacccagacaaatcactcctatctgctggtgctggtgataatgc

SEQ ID NO: 17932 - DNA, 366 bp, Zea mays
  Clone ID: LIB84-017-Q1-E1-B5
ctcgcgggtcgacacaagcctctagagtgagtcctagctagttcctccgcctcctcccgcacagcaaaatggagacctccttcctccccaccacgctccccaccgcaaagcccctcccggcattccgaacccacgctgtagccgcatcgaaacttccccaacagcgccctcgccgctgcaccatacgcgcggccatcacccgtggccgcaaggaggagacggtgaccaccgtccgggagcagctggagggctgctacctcctggctggtatcaagtagcatggcctgacggtgaagcagctgcagggaatccgcgacgcgctcccagacacctgcacactgctggtggcgaaagacactctggtgg

SEQ ID NO: 17933 - DNA, 376 bp, Zea mays
  Clone ID: LIB84-017-Q1-E1-B6
ccaactcgtccggccacgcgtcatggcatcgacaaggacactctggatcatgtggccgcgtatactctgcagcctccttcagcgcgggatctgctcctccatggccaggatcatgttctcctccagcagacagtcggaggtggaggccactcactgtatcaacccaaggcagcaggggcccaaccagtcggacctgtccgtctccaaagcacggtctctgcataagacctgcttacaaacctgaggcagctaaccggattctgtcaatgcggcttatgacccacagacgatgcacgccaaggccaactccctgacgcagctcagcatgtatacctcagatagataaggcacctatgccaaggatgcaatgtcagtc

SEQ ID NO: 17934 - DNA, 406 bp, Zea mays
  unsure (1)..(406): unsure at all n locations; Clone ID: LIB84-017-Q1-E1-B7
aggcagcacactcagctatccagcaaaagagatcgagaggcaggagtcatggccaccgtcagcgccgccgtggtgaccaccatcgttgcccgcgccgcgatcgccaggcccaatgctctagggctgcctgcgctgagggcgaggagcgagagggtgcggtgcagctacgccaaggacgcggccccagtcagcaccaagggcgcaggcgcgtcgctgctcgccgcagcgggcgcggtgaccgcgtcggcggggcccgcgctggcgctcgtggacgagcgcatgtccacggagggcaccgggctgagcctcgggctcagcaacaacctgctggggtggatcctcctgggggtcttcggcctcatctggtcnctctacaccatctacacctctgacctcgacgaggacg

SEQ ID NO: 17935 - DNA, 421 bp, Zea mays
  Clone ID: LIB84-017-Q1-E1-B8
cccacgcgtccgcccacgcgtccggtcttcacactcctcgccatcacataaaaccagtgcaagcagaagcagcgcaatggcgagcagcaccatggccctctcctccacagccttcgccggcaaggcagtgaacgtgccgtcgtctctcttcggcgaggcccgcgtgacgatgcgcaagacggcggcgaaggcaaagccggcggcgagctccggcagcccgtggtacggccccgaccgcgtgctctacctgggcccgctgtccggcgcgcccccgagctacctgacgggcgagttcccgggcgactacggctgggacaccgcggggctgtcggcggacccggagacgttcgccaagaaccgggagctggaggtcatccactcccgctgggccatgctgggcccgttgggctgcgtgttcccg

SEQ ID NO: 17936 - DNA, 408 bp, Zea mays
  Clone ID: LIB84-017-Q1-E1-B9
cccacgcgtccggcaaacatcttgatcatgtgaatatgcttggacttagcaagaccacacttagattacgatacctaatcaattggttggtgacctcattactgcagctccggttgcctgattcaggggatggcgagggggtaccccttgtttatatatatggtccaaagatcaaatatgaccgtggagcagcagttgcattcaatataaaggactgcaacactggaacctccctgataaatcctgaaactgtacagaaactggcagaaaaagaaggcctctccttgggcgtcgggttcctaagtcatatacgcctcatagacaaccagaaacatggtgcggttgatgtggggttaagttcttccttgccagcggcaaatggccgtcgtgaaaagaaaaatagcaaga

SEQ ID NO: 17937 - DNA, 379 bp, Zea mays
  Clone ID: LIB84-017-Q1-E1-C10
cccacgcgtccggctacgtagcagtgcaataaaaaaagcagccgcaatggcgagcagcaccatggccctctcctccacggccttcgccggcaaggccgtgaacgtgccgtcgtcgtccgccttcggcgaggcccgcgtgacgatgcgcaagacggcggcgaaggccaagccagcggcggcgtccgggagcccgtggtacggccccgaccgcgtgctgtacctgggcccactgtccggcgagccaccgagctacctgacgggcgagttcccgggcgactacggctgggacaccgcggggctgtcggcggacccggagacgttcgccaagaaccgggagctggaggtgatccactcccgctgggccatgctgggcgcgctc

SEQ ID NO: 17938 - DNA, 158 bp, Zea mays
  Clone ID: LIB84-017-Q1-E1-C11
gcgggtcgacgcaagactctaaaatcgagtcgtattacccagcagctgcatcgatggcacctaatgcggagaagaagccggctgcgaataagccatcgacggacgagcccgctgacgcgaaggccccggcagggaagaagcccaaggcggaggagcgc

SEQ ID NO: 17939 - DNA, 377 bp, Zea mays
  Clone ID: LIB84-017-Q1-E1-C12
ctcagaacattagaaaatcaacctaaatatccactcccgtcgtcctggactcgcagttcatccacgacccaccgaaccacaatggccacgttcctgggaagctcaccggcgctcctcgctcgtcccatcgccaagccgcacatctcctgcgcgcagaccccgcgcccggcaattgcccagaaccagacgccgtccagcgagcagccgggagcacagaaacagcggcactccgtgcaagcgcagccacagcaggcggcggcggcgaggccgaagcacgcgggcgtcgcggactccactgactggatagcctcgtcgttgacgcggcggtccggaatccgtgcggggctggcgtgggccggcttcctggccgtcggcgt

SEQ ID NO: 17940 - DNA, 419 bp, Zea mays
  Clone ID: LIB84-017-Q1-E1-C2
cgccgcaccagcgccagcccgcgccgtggtcagaatgaggtccttcaccgtgcgcgcctctctccgcaaggccaccggcaccgccgccgtggcaatggctgccagcgccctgcttgccggcggtgccatggcccaggaggtgctgctgggcgcaggcgacggcgggctcgtcttcgagcccagccagttcaccgtcaacgccggcgacaccatcacattcaggaacaacgccggcttcccgcacaacgtcgtcttcgacgaagacgaggtgccgagcggcgtcgacgctaccaagatctcgcaggaggagtacctcaacgcgccaggccacacctactccgtcagcctcaccgtgccgggaacctacggcttctactgggagccgcatcaaggagccggcatgggcggaaagatcaccg

SEQ ID NO: 17941 - DNA, 365 bp, Zea mays
  Clone ID: LIB84-017-Q1-E1-C4
cagacgcgtgggctagcctcacctaccctatacacagccactactgttgatcgattgagtttgaacccaccaggatcaggcttacgattacagcatgtcggcgtccccggagttgtacaggcccgcggaagcgccggccttctcgccgtcctgcgccacgcagccgctcgtgttcgccggcgacgactactgctgcaggacgccgacgggcagcgggatctgctacctgagggagcccagcacgtgcccgcccgcgccccggaatccgccgccgccgccgcccacgtgcaggaagcgcctcttccaagcggggggtcagcaagttgcctaagcggggcccgtccctgttgtgagaatcggcctcg

SEQ ID NO: 17942 - DNA, 279 bp, Zea mays
  Clone ID: LIB84-017-Q1-E1-C5
ggataactcatgcaacacactcagctatccagcaaaagagatcgagaggcaggagtcatggccaccgtcagcgccgccgtggtgaccaccatccttgcccgcgccccgattgccaggcccaatgctctagggctgcctgccctgagggccaggaaccagagggtgctgtgcaactacgccaaggacgccggcccagtcagcaccaagggcgcaggcccgtcgctgctcggcgcaacgggcgcggtgaccgcgtccggggggcccgcgcttgggctcctt

SEQ ID NO: 17943 - DNA, 352 bp, Zea mays
  Clone ID: LIB84-017-Q1-E1-C6
tcgtaggtcgtcacaagtctctagagtgagtcgtactagcaccccaaccatggcagatgccgccgaagcgtctcctcttcctcacaccgttggcctaggagaacgtctacggtgacgatcctcgcctagtgttatcgcagcctcgacaagggcgatcaccacactgatcggagcctaacaatacgtagtatttcgttgcatttttagaagcgcaattgacatgatatctatgtgttggatgtacaaacacgactatccgacgtaagtggtcccaggatttttagacttctacatttaatagacgaatttacggatgatttaactcgttgctatcttgagataaggactacat

SEQ ID NO: 17944 - DNA, 378 bp, Zea mays
  Clone ID: LIB84-017-Q1-E1-C7
ggagtactcacatgtgtgtaagtatgcgtgctccgaggaagtccccgagctccaggacatgggtggcccagtcgaaggtggtttcagcgttgcgttcgaccccctcgacggctccagcattgtcgacaccaacttcaccgtgggaaccatcttcggagtctggcccggcgacaagctgaccggagtgaccggcggcgaccaggtcgctgccgcgatgggcatctacggccctcgcacgacctacattgtcgccctcaaggactgccctgggacgcacgagttcctcctcctcgacgaaggtaaatggcagcatgtgaaggacaccacgaccatcggggaagggaagatgttctctcctggtaatctgatggcgacatt

SEQ ID NO: 17945 - DNA, 417 bp, Zea mays
  Clone ID: LIB84-017-Q1-E1-C8
ggcggtagtgcatgccctcgggagtgggattacgccaggttcagggccatcgcacacaagtgcggggccatgttgctctgtgacatggctcatatcagtggtctcgttgctgcgcaggaggctttgaatccttttgaattctctgatgtggttaccactacgacccagaaaagtcttcgagggccaaggtctggtatgattttctacatgaagggcccaaagcctccaaaaaaaggccagcctgagggtgctctgtatgactacgaggacaagatcaactttgctgtgttcccgtcactccagggggggcctcacaatcaccaaattgctgctctagctgtagccttgaaacacgccatgtcacctggattcatggcctatatccagcaagtcaaggcaaacatagtttcacttggt

SEQ ID NO: 17946 - DNA, 89 bp, Zea mays
  Clone ID: LIB84-017-Q1-E1-C9
acgcgccgcggcagcagatggggagagagagatgcagagcgatctagcgatagagcgctggtcatggggtcactgtctgtcgccgccgt

SEQ ID NO: 17947 - DNA, 374 bp, Zea mays
  Clone ID: LIB84-017-Q1-E1-D10
ggagaatgcacgggcagctgcccagcaggaagggtttgaggtaaagaggaaaggggataaggagtttgttgcaaacattcggctggagatgaactacatgccctgagaagttcaagttatcacagccgcttatggaggtgcttggggtggaggtggacactcgtgcacgggtgattgctgccctctggcagtatattaaagcaaagaagcttcagaacccaaatgatccttccttcttcatgtgtgaccctcaattgaagaaggtgtttggggaggacaagctcaagtttgcaatgttgtcacagaagatatctcagcatctgtctgccccaccacccatcaatttggggcacaagattaagctgtcagggaac

SEQ ID NO: 17948 - DNA, 383 bp, Zea mays
  Clone ID: LIB84-017-Q1-E1-D2
cgcgagtgagtgaacaccagccgtattgtcgcgaccccgaccgatcctcgcctgctgcagccatggcgacctccgcggcgctctccaccgccgccaatcccacccagctctaccggtcccgcgctttgctgggcaagccggtgaaggggcttggcctgagcatgggccgcgagcgcgcccagcggagcattgtgtgccaggcggcgagcagcatctccgccgaccgcgtccccgacatggtgaagcggaagctgatgaacctcctcctcctcggcgccatctcgttgcccaccgtcggcatggtcgtcccctacggcgccttcttcgtccctgccggctccgggaacgccggcggcgggacctacgcgaaggacaagctgggc

SEQ ID NO: 17949 - DNA, 286 bp, Zea mays
  Clone ID: LIB84-017-Q1-E1-D4
tacaatgcgtctgactacgcgtccgggcaggtcgagcactgcactgggcacgcgtgcaactgtacacaatcgattcgtcgtgtgatctcggatttgcatccctccttaaggttagtaagctcgatggccgatctaggctttgatcgtggcaacaacgttcttcccacgctcccgtgttacgtcggcacacacagcaccaaatcctcgtccacggacattattcgccacatcaactcatagattgttcacactcacgaccatatgtgagcgagacccgctcgccata

SEQ ID NO: 17950 - DNA, 59 bp, Zea mays
  Clone ID: LIB84-017-Q1-E1-D5
atcctccccactcccagggaacaacattcatcatcaatcgactataaactcttggtttt

SEQ ID NO: 17951 - DNA, 415 bp, Zea mays
  Clone ID: LIB84-017-Q1-E1-D6
cggacgcgtgggcttgctctgatagcttgctccaggacgtacgtacgtacgtagatcgatccatcgatcgctagctagctgacgaccatggcgtccctctcctctgccgccatcaccgccccttccttcacggccgcgcccgctcgcgcagtggtcagcaggaggtccttcaccgtgcgtgcctctctccgcaaggccactgccaccgccgccgtggccgttgccgccagcgtcctgcttgccggcggcggcgccatggcccaggaggtgctgctgggcgcaggcgacggcgggctcgtcttcgagcccagccagttcaccgtcaaggccggcgacaccatcaccttcaagaacaacgccggcttcccgcacaacgtcgtgttcgacgaagacgaggtgccgagcggcgtcgacg

SEQ ID NO: 17952 - DNA, 329 bp, Zea mays
  Clone ID: LIB84-017-Q1-E1-D7
gcatgtacaaaatcacaagacaaacgaatacatcgattttagagcaggagagattattgagtccacggtgaatgaagcatgcaataaattacatgatgattgtggggattaagctattacaagattgatgttgtgacgctagcagctaacgtagcagctaggcagcagcctcacttcacaactacaagtcacacaggagcatggggtccttgaccagactggcctcactcatttcacctcgaggatttcgtccaaagggtacttgttggtagacacgccggcgtagttcaacttgttgaatcgcaagagcaacgggtaaagggtgttag

SEQ ID NO: 17953 - DNA, 374 bp, Zea mays
  Clone ID: LIB84-017-Q1-E1-D8
taaacgacgcgttcggctaacgcgtccgcggcaaactccaagaacctgggccgcctgggcccagcacgttatcctcgtcaccagctcgctcgcgtgcccagcttcctgttttccctcttcctcccgcgctcggacatcgccagtgaaggcccgcgcgcgccgtcgtttgaatcctggttttctccctactcgctgcgctcacgtcgtcgtcttcctgctcgttccgcgacgtcgctcccagtccacagctcgttggcttccctgtgcgcggttgcggatgccgtcgcccgatccttgtgccttggcccgatccttgtgccttgccgagctcatcagcgccgcgagactctgcatcgctgtgctcagccacgcgt

SEQ ID NO: 17954 - DNA, 391 bp, Zea mays
  Clone ID: LIB84-017-Q1-E1-D9
ggcgacgccgctctccagccccttggctcccaccgccctccgctcccctctccggcaccgcgccctgctgctgctgctgccgttccctccccgtgcggcctcctccggcgaggacgccgccgcagcagccgaccaggagccggccccggcggccaccaagacggccaccgcggacgacgacttcgaggagcgcgtgctacggatcaagtcccgcgtcgggcccaagaagcgcggcgcgcgcaagaagaaggccgcggcgtccgcgtcagccagcgccgtgacgctcccgcccgtgccgctgcgggagccccggtcggcgctcggcgcgcccgtcgagctcggcttcaccgcgtacagcgagcggctcaacggcgcgctggccgcgctgggg

SEQ ID NO: 17955 - DNA, 158 bp, Zea mays
  Clone ID: LIB84-017-Q1-E1-E1
cccacgcgtacgcccacgcgtccgctagaatccgggctcgtagatgctggagtacacagtacagggaaattgcccacttttttcatcaacttaagtttttagattaaacttttttgaaacaatcagacaggagatctgtcttatatattgatgaggag

SEQ ID NO: 17956 - DNA, 381 bp, Zea mays
  Clone ID: LIB84-017-Q1-E1-E10
aaaatcacgtctcctccacccgcactccattggcgccgctcccctcccctcgccgccgccggagatctgatccgatccgatccgatccgtttgtgcttgtgctgcagcaggagtgagaagtaaaaaaatatggctgccctgccactggccaccgccgaagtatgcgacgctaaccctcacctgatcatgaacggcgagctccgcgcgctccagccaatcttccagatctacggacggcgccaggtcttcgccggccccatcgtcacgctcaaggtctacgaggacaacgtcctggtccgcgagttcctcgaggagaaaggccacggtagggtcctcgtggtcgacggcggcggcagcatgcgctgcgccatccttggcggc

SEQ ID NO: 17957 - DNA, 397 bp, Zea mays
  Clone ID: LIB84-017-Q1-E1-E12
cccacgcgtccgcccacgcgtccgagcatctccgccgaccgcgtccccgacatggagaagcggaagctgatgaacctcctcctcctcggcgccatctcgttgcccaccgtcggcatggtcgtcccctacggcgccttcttcgtccctgccggctccgggaacgccggcggcgggacctacgcgaaggacaaactgggcaacgacatcacggtggaggcgtggctcaacacgcacggtcccaacgaccgcacgctcgcgcaggggctcaagggtgaccccacgtacctggtggtggagcaggacaagacgctggccacctacgggattaacgccgtgtgcactcacctcggctgcgtcgtgccgtgggacggcgctgagaaaaagttcatctgcccct

SEQ ID NO: 17958 - DNA, 411 bp, Zea mays
  Clone ID: LIB84-017-Q1-E1-E3
gtcgacgcaagcctctagaatgactcgtaggattacgttggagaagaatggacctatatcactgagctttgtggtgttggcaagtatgctgctgatgcttacgcaatcttctgtgctggaagggcaaacgaagtggttccaaaagatcacaagttagtagattactggaattatgtctgttttgagttaccctcgattcagaaatcgcaggaggctggagtgacggagctgggaaaccttgtcgctaaggtgcatgaagttgctgtcagctgttgacatgggaaaacagtaacgcggtggcaagcgcttttggtgtttctgcttgcagcttaataatgttattcgctccgttctttttttatctgtcatgttttagttcaaaaatattcgaggactgaggtagtataatat

SEQ ID NO: 17959 - DNA, 402 bp, Zea mays
  Clone ID: LIB84-017-Q1-E1-E4
ctttttctttcctttttttaaactggatttcgattcgtctagttttaactggattttataagcgcgggtagtaagtaactggtgtcgaggattgaacttgctatttgtgaatgactggagtacaagctaggtacaaaatgaatgaattaaactaaactagtctccggacgagccagattagcaacgctgacagtggactaaaaagctgcagctggcgaaagcagttcttttggaattacgaaatacgtagtaaagtcacctcaccacttcaataggcagcatcgctgcagtctgtaggagctcgatatcctgccgcggcagatttctgaaatgtcataatagttccccccaacatgtcaatgttggaagagtacagcaactcgcatctacatgtggcagagc

SEQ ID NO: 17960 - DNA, 422 bp, Zea mays
  Clone ID: LIB84-017-Q1-E1-E7
gctagcgcttatagcttgtcagccatggccaccgccgccgcgtctagcctcctcaagtcctccttcgcgggctcccggctcccggccgccacgcggaccacaccggcgtccctcgtggtggccaccggcccgcgcggcgccggcgcggggcccatctgcgcgtccatgtccatgtcctcctccaacccgccctacgacctgacgtccttccggttcagccccatcaaggagtccatcgtgtcccgcgagatgacccgtcgctacatgacggacatgatcacctacgccgacaccgacgtcgtcatcgtgggcgccggctccgcggggctgtcctgcgcgtacgagctctccaaggaccccgccgtgagcatcgccatcgtggagcagtcggtgtcgccgggcggcggcgcgtggctgggcgg

SEQ ID NO: 17961 - DNA, 387 bp, Zea mays
  Clone ID: LIB84-017-Q1-E1-F1
gttcgctcgctcgctcgctcgtttgctcttatcccccttgctttgctcgttcgttcgattggagctagccgctgcgtggattcctcggctcgccgtccggatctggcctcgctgagctgcagctgccgcgaatcccgactcgattcggccgcgctcggatctcgccggactagcggggaccgaggcctctcgattcgcctcggggccgagatggatcatgtggtcggaggcaagttcaagctcggcaagaagatcgggagcgggtcgttcggggagctcttcctagctgtgaacgtgcagaccggagaggaggtcgccgtcaagctgggaaatgtcaagacgaagcacccgcagcttcactacgagtccaagctatacatgcttctc

SEQ ID NO: 17962 - DNA, 395 bp, Zea mays
  Clone ID: LIB84-017-Q1-E1-F11
cgcccacacgctgcgcctcgtgcgcccgcccgtcgtctgggtcgtcgtcgagcccgccgccgacgcgcccgccaccgctgaggtgctccgcggcaccggcgtcatgtacaggcacctcgccttcaagcccgaggacaacttcaccaccgccgacgccgaggctcacgtgcagcggaacgccgcgctcgcgcatgtcgagaagcaccgactcgccggcgtcctgcacttcgccgacgccgccggcgtctacgacgtcggcttcttcgaacagatccgccagatcgaggcgtttggtacatggcctgtggcaacaatgtcggcgggcgagaagaaagtggtagtggagggtccactgtgcagtgcctcaaaggtcgtcggttggttctcaagggact

SEQ ID NO: 17963 - DNA, 413 bp, Zea mays
  Clone ID: LIB84-017-Q1-E1-F2
cggtgagcaaagtgatggacatcgtctccgccttcgccgcgtagacgcgaaaccgagacggtgagcaaagtgatggacatcgtgaagcagcagctggcgctggcggcggacgtggggctgacggcggagaccaagttcacggacctcggcgccgactcgctggacacggtggagatcgtcatgacgctggaggaggagttcaagatcaccgtcgaggaggacaatgcccagagcatcgccaccatccaggacgccgccgacctcatcgacaagctcgtcgaccagaagccacgagacagcgactgattgtcgacgcgacgacacccaaatcctatccatcgatcgccgctcgtgcatgtgaatgctccgttaatgtactgtaattgagtagtttttttttttatctctagcta

SEQ ID NO: 17964 - DNA, 401 bp, Zea mays
  Clone ID: LIB84-017-Q1-E1-F3
caggccatggccttggaaactcttgaaatccggcctgatactttcattctgttagatgttccagatgaactccttgttgaaagggtggttggaaggcggcttgatcctgtaacagggaaaatatatcatttgaagtattctccgccagagaatgaagaaatcgcttcaaggcttacacaaagatttgacgatacagaagaaaaggttaagttgaggctggagacttattaccaaaatatcgagtccttgctatcaacatatgagaacattattgtcaaagtgcaaggagatgccacagtggatgctgtctttgctaagatcgacgagctgctgggttctatcctggagaagaaaaatgaaatggtttccagcacatgagcaaggtaaaaatgattgggtgc

SEQ ID NO: 17965 - DNA, 419 bp, Zea mays
  Clone ID: LIB84-017-Q1-E1-F4
gccatcgccccgatggacaccgccgcctcatgccgcctcctctcgccggcctcctcctctccgcccccctgtccgaagcagctacccaagcggcgaccgaccttcgcggcctcgcagcagcagtcgcccagctccagcgccaagttcaggctcctctgcctcctccatgacaagtccgcgtcgccaacgacgtcggtgcagatgcagagctcacagtcacagttgcagaggctggcgacggtgttgcagtgcggagccgtctgggcagctgttgaggcgccgggggcgctggcggtgaccggcgaggaggacatcgacctgctagggatcctgccgccgctcgcggtgttcgccgtcgtctacttcctcgtcgctcctccggtgatgatgaactggatgaaggctgaggtgggacaagc

SEQ ID NO: 17966 - DNA, 413 bp, Zea mays
  Clone ID: LIB84-017-Q1-E1-F5
accacgcgtccgcccacgcgtccgcagcgctgctcatggtttctggagcagttggggctcagctttcgtacttgttacctactggatcaccgtcaaacgtaattgggttcagcactggccacattaccatcaaggatctcgtgaccacagggcttcccctgaaacttgtcggaatcgcggctctgacagtcttgatgccaactctaggatcacaggtttttggcacaaacagcaagttctaggagcggaatgcatattggacggttcattcttccaagcccaagttctaggagcggaatgcatattttggaccgttcattcctcgaagcccagttgtatatatgtacagtactttcccttgtatctacggcctagtcaaagttagtgggagggtatactctttgatctgtaca

SEQ ID NO: 17967 - DNA, 403 bp, Zea mays
  Clone ID: LIB84-017-Q1-E1-F7
cgaagtgcgagcgacccacgtccacacgacacgaaccaccaccaccaaccagcagccgcaccacgcacccagcgcaaagcgatggcgtcgctcaccatgatggcgtccttcgccgccgtggcggtggccgcgccctcgcgccgcggcaccttcgccgtggtcaggtccgccaaggtcgaccgctgccaggagcccgccacgctagcagcaaccgaggccaggcccgccgccgacggacgccgcgccgtcatgctcgcggctgctgcggcggccgtggcagccatcggcggcgccggcgccgccatggcgggccccaagaacgggacccccgaggcgaagaagaagtacgcggccatctgcgtcaccatgcccaccgccaaggtctgccacaactgagcacgcc

SEQ ID NO: 17968 - DNA, 412 bp, Zea mays
  Clone ID: LIB84-017-Q1-E1-F8
atgtacacaccaagttcaatatcaacatgacttttgcaggagaaccggcgtgtgctagctactgacgagtggcttagggttcaagggtgtgaggatgtatatgctcttggtgattgtgcaacgattgctcaaagaaaagttatggaagatgttgcttccatattccgagtagcagacaaggataactctggcactttaaccgtgaagaaaataaaagatgtccttggggacatatatgagagatacccacaagtggaattgtatcttaaatccaaccaaatgaagagcttccacgagctacttaaagactcagatggtaactccaaggagttgaaagaactgaacatcgaacagttcaaaaaggcccttgctcaagtggactctcaagtcaagatgctcccagcaacggctc

SEQ ID NO: 17969 - DNA, 289 bp, Zea mays
  Clone ID: LIB84-017-Q1-E1-F9
aaactgagtccctccattatgttgccagtcaacttttggacggtgtcgttccaagttgcacgccaatacgtacttagtaagcaggtgtacgtaccttcacgaacgtcttcgagtgttcacatgtagatgattctacttactgcatacacgtagaggttaacaatcgagaaacgaggcagtttatgcatccaggtttgtgcgcgaagagcccgtagtctgtgacgtatgatacgtgtaagagtcgtatcaatcccaagtgagtttatcgcgtcacaactcagttgcagct

SEQ ID NO: 17970 - DNA, 409 bp, Zea mays
  Clone ID: LIB84-017-Q1-E1-G2
ggtcgacgcccgcgtctaggtggaatgcaatgagcgctggatattttccgtagtcgacgtactttgaaggcatcaagagcgctatttcaacctatgccattgaccatagtctcgagagcccagcagaaaatggaagtgcttcgaaccctcatctgaaatcagaagatggagaataagggagtttgaatgggactctgcagattgtatatcatttgagcagcctaagcattcggtaatgcacgaacaagttgctgaatggtcacaactggaacagaacattttatgaactggagccagtatccaattaaccaaagcgtacacgaacaaggggaacaaagtgctctggtgcaagtagttgtcggcagatcacatatgaagagtatatgattgattgggaactgaggtgtcc

SEQ ID NO: 17971 - DNA, 403 bp, Zea mays
  Clone ID: LIB84-017-Q1-E1-G3
cgagaagagtcgaggaaaaatctcgcattcgcaaaccaagcaaatggaggcatgagctccgccgcctccccgtctctcgccgatctcccccaaaccctagcctcgacctgaccgccagcgggcccgcaggccggagaaggagtcggagtcgcccccacccacccaccctctgccgcgggcggggagcgggcggcggacgagatgccgtcgcacggggatctggaccggcagatcgcgcagctgcgcgactgcaagtacctgcccgaggcggaggtcaaggtgctctgcgagcaggccaaggccatcctcatggaggaatggaacgtgcagcccgtgcgctgccccgtcaccgtctgcggcgacatccacggccagttctatgacctcatcgagctctttcgca

SEQ ID NO: 17972 - DNA, 302 bp, Zea mays
  Clone ID: LIB84-017-Q1-E1-G4
gctgaagttcagtatttttctgtggtctgaatgtccaaattccggtggcatcttctatagctatgctttgctttgctttgaacacttgtgttttagggctttctagctgaacccgttgtccaatattgctgacgttgaaatttttggttaatcttaaaactggaaaaaaaaaaaaaaaaggaaaaaaaaaaaaaaaaaaaagacaacaaaaaggagataaaaacaagaaaataaaaaaaaaaaaaaagagagaaaaacggagaaaaaaacgaaaagaccaagtaagaaagggggggcccccc

SEQ ID NO: 17973 - DNA, 399 bp, Zea mays
  Clone ID: LIB84-017-Q1-E1-G5
cggacgcgtgggcggaccgtgggcggacgcgtgggcggacgcgtgggtgagctgataaggttgcgctgtgggcacaggttccactcgacatgcttggagccatgggcgcggaaatgtgcagactgcccatactgtcgaacgaacatacggtcacgatcctgacgacaaacccttagttcagaataagcttataaccaccatggagtttcactgttgtaaaattcgctgttgtgggcatgccagttaatccggtgctcctatggcgacatgtaatttctaatatcctgaatattttgtgttgtgtcgctcagagaggtttatggtgttgtgtgcgagtggaggctgatagcagtatagcttagaaagcacccttttgtgtgtatgtagcgagggatcacg

SEQ ID NO: 17974 - DNA, 273 bp, Zea mays
  Clone ID: LIB84-017-Q1-E1-G7
accacgcgtccggatcgcacttgacgatcaaatcgaatcgcacctattcctctctttggcggtagccgcgtagcgcccgctcagtcgccgccgaccacggcggagaaattgcggcttcacctcgcctgtgtgtcctgattacgcgaggactcgagcggctaagcttagcagcgatctcggtctcagcgaggtcggtgggtgccggaagagaaatgggtggcttccacttacatcacacctgtgtcaaggcacgcaaagtgtttgtgcgagatg

SEQ ID NO: 17975 - DNA, 391 bp, Zea mays
  Clone ID: LIB84-017-Q1-E1-H10
gaaataagtgaatggtcgaatgctatgctggaaaagaatgttgaggagcttcgtgaatccaaggagagatgctttgagaaatccttggattgcgtaagaaaactaaaaaccagctttgccaaggtgggtgcgtagtcttccaaagaaaagttcattcgaggtgaccccgagggaatcattgattgggtaggtgaagaagccgaagcttttggagatatccttagtgatcatggggatagttgtgccttcgccggtgcttggggggttgcagcaattctggagaaagctggttgtgaccatgtgaaagctgtggctcagaccgaaacgggcttctccacagacgacaggaaggacccctcgggcgaagccactttggtgggcgggaagtttt

SEQ ID NO: 17976 - DNA, 402 bp, Zea mays
  unsure (1)..(402): unsure at all n locations; Clone ID: LIB84-017-Q1-E1-H2
atcaaagtctaggtctaagtctangtcacgtgctcctgaggaagtccttcctggagaaggattcaaggactctgagcagaagaaaaaggctatcaagaaagcaaaggccgctactaggaacaggaacaaggaagctcgtcgtggagaggctgaccgtgttattcccactttaaaaccaaagcatttgttttctgggaaacgcactcttggaaagacaagcaggcgataagctcagtacctcactggatctggtaataaaggactggtgcaattttggtgtgagcaatttgatgaaacgggagcttttatgtctagcacttatgtatgctacttatttatgaaatgtcttgctgttgctgtatcatggtcctctttaagacagttttactagtttatacaatg

SEQ ID NO: 17977 - DNA, 407 bp, Zea mays
  Clone ID: LIB84-017-Q1-E1-H4
cccacgcgtccggcccaccgaattccctgcgattcctctcccctcgcctcctcgtctccccctaggggatcgtcggagaggaatcgcaaagagggccgtctcatccgagttaaggaagccatggagcacaaggaggctgggtgccaggcccccgagggacccatcctctgcatcaataactgtggcttcttcggcagcgcggcgaccatgaacatgtgctccaagtgccacaaggagatgataacgaagcaggatcaggccaagctggctgcctcctctatcgacagcatcgtgaacggcagcgacgccgtcatggagccggttgttgctggcagcaacacggtagtagctgttgcccaagttgagttgcaaacaatgaacggtgcagcagcccgctgatgttgccg

SEQ ID NO: 17978 - DNA, 398 bp, Zea mays
  Clone ID: LIB84-017-Q1-E1-H5
caacctcaagcaggacctgtacgccatcatacaggcgaggcccacggggcagcgctctgagctccgcaggctctactccgacctcttcaacagcgtcaccagcctggattacgccgccagagacaaggacgcgctccaggtgcaggagcactacggcaacatcgtctccgctctcgacgagattttctccaagatcacgtaggatactcagaaatctatatttccagttcgtggatacaaaggcggagcacggataagagagaactaggaacttagatcacgttcacatgaaggaagaactagcagcacatggcgacaggcaaaaaggatccttcttgctatgtagcgacattttttttcttctagagagaactatttagctagttcttgtgagcttc

SEQ ID NO: 17979 - DNA, 308 bp, Zea mays
  Clone ID: LIB84-021-Q1-E1-A10
acggacgcgtgggcggacgcgtgggggagtggtcgaaactcgagaagaagggtccacagatcatccttgatcgtcatccacataatccctatctcggaatcaactgttctacttcgaagtatctatcaacttcactactacagactacagtccacaatctatcagcttcactactacagtccacaacagaggaagaaaattatccaacggacaattccctatatgccactacagttttgctcggtactttattcaccatcgtaaatattataatcggatgtaaattcttatccttctatatcatcgct

SEQ ID NO: 17980 - DNA, 385 bp, Zea mays
  Clone ID: LIB84-021-Q1-E1-A11
ctgggacgagtcagatggtcagtgggacgtagacccagaagattatggtctgttcctttccattttcttcatcggccttcaattgaggcaaagctcggtcctagcgtctaagatgtctgcgtgatgatacatggattcaaaagaattgtttgcttatctggcccacttcccgcactcctttgttcctttactcgtgtaatatactaagatgtcaggcccgcttaaacaacagtaataaacgaccttcgaaggtcatgtagttatcagttcagtttgtctggtgtttattgcatggggatagaagtgattaagtgaagcgttcaatgttcagtgaagtggctgaaaacaatcagggttagtattatgtaccttctcgcttgctcgt

SEQ ID NO: 17981 - DNA, 374 bp, Zea mays
  Clone ID: LIB84-021-Q1-E1-A12
actcctcgccatcacataaaaccagtgcaagcagaagcagcgcaatggcgagcagcaccatggccctctcctccacagccttcgccggcaaggcagtgaacgtgccgtcgtctctcttcggcgaggcccgcgtgacgatgcgcaagacggcggcgaaggcaaagccggcggcgagctccggcagcccgtggtacggccccgaccgcgtgctctacctgggcccgctgtccggcgcgcccccgagctacctgacgggcgagttcccgggcgactacggctgggacaccgcggggctgtcggcggacccggagacgttcgccaagaaccgggagctggaagtcatccactcccgctggggcatgctgggcgccttg

SEQ ID NO: 17982 - DNA, 373 bp, Zea mays
  Clone ID: LIB84-021-Q1-E1-A4
ggggatgttcttaaggttaagccattggcagctttaccaatgattgatgagggagagcttgactggaaaattgtggccatttctttggatgacccgaaagcatctcttgtgaacgacgtagatgatgttgagaagcattttccggggacactgactgccatcagagactggttcagagactacaagatacctgatggaaagcctgccaacaaatttggtctcggcaacaagcccgcaggcaaggaatacgccctgaaggtcattcaagagaccaacgaatcatgggagaaattggtaaagagaaatattcccgctggagagctctcgttggcctgattttggcccatgggaagccaccacattcctttgaact

SEQ ID NO: 17983 - DNA, 247 bp, Zea mays
  Clone ID: LIB84-021-Q1-E1-A5
atataatgaaagtattacaggataggaagtacgtgacagcaaaaagtcgagttctacaccctgagttccgtggtcgaatggtctcggcattccgtttgcaccaattctctgacgttgctgattacagccttacagctaacatggaaacagagctagatcacgtctctgctgggctaactgaatggaacggtcttctaaaaggctactgggaacgaatcagcaaatattgtgcagatgcgagttatcc

SEQ ID NO: 17984 - DNA, 325 bp, Zea mays
  Clone ID: LIB84-021-Q1-E1-A6
atgtacgcggtggggttctggatccgggagactggccaggccctcgaccgcctgggctgccgcctgcagggcaagtacttcttccacgagcagatttcaaggcatcgcaccatcatgaatatcgttgacaaaacccctcatgtgcataaagacgcatttgttgctccaagtgcatcccttattggtgatgttcaagtcgggtcaggagcttccatttggtatgggtgcgtcttaagaggggatgcagacatcatacacattggatctgggaccactatacaagacaattctcttacacatgtgggcaaatctaatctaagtggga

SEQ ID NO: 17985 - DNA, 335 bp, Zea mays
  Clone ID: LIB84-021-Q1-E1-A7
caaaaaacttgaagagcaggctgcccaacttcacatgttgactggctggtcacagattgttgaagttgctgtatcaagaaggatgtcattattcgaggactgttatcagctattgtttgagagaagcataccaagttctcagtgaccctacacagcgccaagcttatgactcgcatgggaaagacgacatctcaacgtacgttcagttacaaataaattacttgccgccgcttttcagtggaaccagggcttgttggaacatgggaaagtttcttatttctatgtgaatcaaactgtttcaaaccagtccagtgccttttttttggcactgctgc

SEQ ID NO: 17986 - DNA, 336 bp, Zea mays
  Clone ID: LIB84-021-Q1-E1-A8
aacgtttccccagatccagatcgcaggcgtgaagggcgactgttaccagattatgatccgttttcgagcttcgaggaatcgacggtcaagcttcggtgaccaagtgacctggttcttcgagttctggaaggttgaagaccctgagcatctatttggtgaaggttgtccacattgcaaccactgctcaggagaagacgaagtcgtggaaggagacttccaggagtttcaagactacgacgaattctaggtgtgggttggcggcaaaccccagtcagctggctgtgaaggccttatctttactgtgtttcgctaacactttgatttaactgtaagttg

SEQ ID NO: 17987 - DNA, 366 bp, Zea mays
  Clone ID: LIB84-021-Q1-E1-B1
agcgcttggcgagtcggatctcccgtacaccgtgcgtgtcgacccggccaccggcgaggtgaccacgcacggccggtgcgacttcggcggccgtctcttcatgggcatgaccgctcacccgaagaaagaccccgtcactggcgaggtctttgcgttccggtacggccccgtgccgccgttcgtcacctacttccggttcgacccggccgggaacaagggccctgacgtgcccatattctcagtgcggcagccgtcgttcctgcatgacttcgccgtcacggagaggtacgctatcttcccggagatacagatcgtcatgcagcccatgggcatggtgacgggcggcgcgcccgttgggtctgacgc

SEQ ID NO: 17988 - DNA, 98 bp, Zea mays
  Clone ID: LIB84-021-Q1-E1-B11
attggaaataaaaagcgtgtaatgaccttactcagcaacaaggcaagtgccaagtacaatttccgaatgataccaacaatcctaactgagtttttgcc

SEQ ID NO: 17989 - DNA, 159 bp, Zea mays
  Clone ID: LIB84-021-Q1-E1-B12
acggacgcgtgggcggacgcgtgggcgctgggaaacatcctaggctattcctctggctccacaaacaactggcacaagtggtttccgttccttatgacaaacgcctgctgtgaaccctgcgcacacccgaaaggcgcgtttccggtggctgtggtgttc

SEQ ID NO: 17990 - DNA, 292 bp, Zea mays
  Clone ID: LIB84-021-Q1-E1-B2
agcgtgaacttggatggcctgacggaagcacagattgataaaaagctggaggagcttgccaaggccggcgagtctcttaaaaccaaatagttttggaactctatcctgccatgtttaacgttcccaaataaatgatgccatatgggtgagcaattgttactctatcgttatctgtagttgtgcctggaattaagtctttaattggcttaactttgtgaaataatcactactcttttacgtgccatgcattttctagattacatgctatattgaaaagggaaaaaatcaatga

SEQ ID NO: 17991 - DNA, 215 bp, Zea mays
  Clone ID: LIB84-021-Q1-E1-B5
agttggaaaaagcacattctcagcccaactctcgtttgccctagctgaaatggaccatcatgttggccttcttgacatagatatatgtggccctaacaatcctaaaatggcaagcctttaaagaacaaaaaattatcaaaagaaaccttggtggtcacccgtttaagttgaattcaaacctggtgtgaaggtcaatggtttcaagctgcccaaat

SEQ ID NO: 17992 - DNA, 335 bp, Zea mays
  Clone ID: LIB84-021-Q1-E1-B6
aaacaccagtgtggtataacatggtgaaacaaggtctcatcagcgaccctgttttctctttctggtttaaccgacatgctgatgaaggagaacgtggtgaaattgtgtttggtggaatggattctagccactacaagggcgatcacacgtttgtcccagtcactcggaagggatactggcagttcaacatgggtgatgtcctggttgatggaaagtccacctgggttttgtgccggtggctgtccagccatcgcagattctggaacttccttgcttgctggccccacaaccataattactgaaatcaatgaaaagattggtgctgctggtgtagt

SEQ ID NO: 17993 - DNA, 389 bp, Zea mays
  Clone ID: LIB84-021-Q1-E1-B8
acccacgcgtccggtgtcgtgtagtgtgtagtcgcagcagctagcgcccggccggccagtcgagtgagtccatcctccatcgccatccaatggccgccaccgccctgagcatgagcatcctccgcgcgccgccgccctgcttctcgtccccactcaggctcagggtcgcggttgccaagccgctggcggcccccatgcggcgccagctgctgcgcgcgcaggccacctacaacgtgaagctgatcacgccggacggggaggtggagctgcaggtgcccgacgacgtctacatcctggacttcgccgaggaggaaggcatcgacctgcccttctcctgccgtgcggggtcctgctcctcctgcgccggcaaggtcgtctctgggtccgtc

SEQ ID NO: 17994 - DNA, 329 bp, Zea mays
  Clone ID: LIB84-021-Q1-E1-B9
acggacgcgtgggtctgagcagcctaaagcgtccgaaggagcagctgagaaggccgatggagaagatgagaaagttatttctaatgaacaggagacagctgttcctggtaaagatgaaaaaactgtgcacatgataaatcataagaagagtaaggtgactaataaaagaacaagtgtgaccaaagaggctggagggcataaacgtgaacctaataggtcaggaaagcatctcaataaaaataaggataccgataccaacgaagttgatggccctgaaagcactgaaacaaatggagatgggaaagaagagcaacgtgaacacaccaagc

SEQ ID NO: 17995 - DNA, 388 bp, Zea mays
  Clone ID: LIB84-021-Q1-E1-C1
ccacggtactccagccgctaccctgcgattccgccagtacgccaccaccaccgagcctggactaccgccgccgcccttcgccgatatcttcagcggcgaacagcgcccaccagatcccgcccctgcgatggagtccgtggtgaacccgaaggcatacccgctggctgatgcgcagctgacgatgggtatcctcgatatcatccagcaggccgccaactacaaacagcttaagaagggagcgaatgaagcgacgaagaccctgaataggggcatatcggagtttgtagtgatggcggcggacacagagcctctcgagatcctgctccacctccccttgttagctgaggataagaacgtgccatatgtggtttgttcaatcgaagcaagc

SEQ ID NO: 17996 - DNA, 373 bp, Zea mays
  Clone ID: LIB84-021-Q1-E1-C11
agatgatctacaaaatggagttgctggggctgttccagttccacctgatgagggtggcaaagaagaggttatcaattcattggttgccaatgttgaatcaatgattaaagcagaccggaagatcacatcattgaaacaacttcagggtcatatttggaggattggatttcaaaagaaagagctacagggagttgtctttgaggatgttcctgtggcgctaaagaactggcatgctactggcataaaggtctacatatactcaagtggaagtagagaagcacaaaggcttctatttggcaatacaacatacggtgacctgcgaaagttcctgtgtgggtactttgataccacaactggcaacataacagaaaca

SEQ ID NO: 17997 - DNA, 312 bp, Zea mays
  Clone ID: LIB84-021-Q1-E1-C12
caccacagccgccggaagctcctcctcctccttctccatgagagagatctagcaaagcatagcctccttcctgctggcgggatctccttttgattcgtaacttataacagaagaggaggaggcacagcaccttgtcaaatgatgaactctcagaagctgcagctgcccgttcaggatctgatgagtctgagagggagatcattcatcatcagcaaggtgatgatgcaccagtgcactgcagctgtttcgtcgtcgtcttcacctggcctgcaggttgctgcccatcccagtcccagcaagaggccgcgtcct

SEQ ID NO: 17998 - DNA, 380 bp, Zea mays
  Clone ID: LIB84-021-Q1-E1-C9
aatttctaagaacctaaagcccatgatatcgaacccaatgagcacctataatctgtacagaaatcctagaaacaagaacgcaggaaacttcatgagattgtcagactttttgacctttgcaaacggcaaggatttgtcaggaatcatgataactgttgagcatgctgcattcatggcagaggagcttgggtttggtgtggtagatgcagtgatcaaagcacttgatgactctggttatagcaaacagactgcccagaatgttatgattcagtcaaccaacagctcagttctggtgaagttcaagcaggaaaccaagtacaaccttgtctacatgatcgaagaaagtgtccgagatgccgcaccttcctcccttgcggaca

SEQ ID NO: 17999 - DNA, 367 bp, Zea mays
  Clone ID: LIB84-021-Q1-E1-D11
acccacgcgtccgcccacgcgtccgcccacgcgtccggagatggcacaagccatggcgtccatgaccggcctctcgcacggcgttctgcccagcaggcgcgccgccaacagggccaggacggccgccgtcgtcagggcgtccgccgaggcgcaggcgcaggcgggccgccgcgccgtgctcgggctggtggccactggcatcgtcggcggcgccttgtcgcaggcggtgcacgccgagaccgtcaagaccatcaagatcggagccccgccgccgccctccggtggactccccgggactctgaactctgaccaggcgagggacttcgacctccccttgaaggagcggttctacctgcagccgctgccg

SEQ ID NO: 18000 - DNA, 167 bp, Zea mays
  Clone ID: LIB84-021-Q1-E1-D12
acaacgatttacatgcgccaagaaccatctttcttgctagtttagcgttatgtacgcttttgtaatggcttctaaacttgtttttttgatgtagctgtacatttggatgtcctgttagacgtgaaatgttttttacgtcagatatttataactacttctgagtcagt

SEQ ID NO: 18001 - DNA, 314 bp, Zea mays
  Clone ID: LIB84-021-Q1-E1-D2
cacgcgcgcaagcccaaccgatcgagcagctctagcatggcgaacggtgggtactactacgaccacagcgcgggctacagcggctacagctactcggcggcgccgaagacgactccgtctcaactcctggtgttcctggccagcgtggcgctgcagggcgccacgtcgctctactcgcgctatcaatctccggtggagaacctggtggaccaggtgcggttcgccgtggtgctgtccccgctgctgctcctgctcgccgtccagtactgggcggacacggccgggtccccgcggcacccgggcggcgccctccc

SEQ ID NO: 18002 - DNA, 374 bp, Zea mays
  Clone ID: LIB84-021-Q1-E1-D7
acccacgcgtccgcccacgcgtccgcccacgcgtccgcccacgcgtccgcccacgcgtccggaaggaaccaggaaccggtgggtatggctatgggacgaaaaatgacaagaataaggatgtggatacaatagcttcggacttcatcaagctgaagcacaaggcttgggcactccagaagagcacaaccatgtaccaaccttctacctaaaggtgtcaatagttcaagaagttgatactatatacttatgcttgtcactgtatagtctataagtcctaattcagataacaggtgctgcttcagccttggatatttgccgattccgagtgaagttaccatggcatcgttgctaagaataagaaagtaatgtggtta

SEQ ID NO: 18003 - DNA, 339 bp, Zea mays
  Clone ID: LIB84-021-Q1-E1-D8
acccacgcgtccgcccacgcgtccggcgacaaccactgagccgagcgggggtggatatggcagcggtcgccgcccaccaccacctccacccctcctccgtcgctgcccgaactccaacacttggccgacgccaccgtttctcgtcgcttcctctcgccgcgcggccgtcctcccaaggccgtttcagcttccgagccgcgacccgcgtcctcacgcgcgccggaagcactggcgccagcagcgccgcctcgcccgccgcgacgacggcgtcgtcgttgtcgctggaggagctgcgcgggggctgcagcacctggacgtggcgagggatgcgcgtgaact

SEQ ID NO: 18004 - DNA, 388 bp, Zea mays
  Clone ID: LIB84-021-Q1-E1-D9
cccaaccaagcccgcacgacacgacaccaagtcgaggagctcgagagggcaccaataatggccggcgtgaactccagcgtcgtcgggctcaagcccgccgcggcagtgccgcaggccgccgccgcctcatcgccggcgaagcgggtgcagctggccgcgcccgagggccgccgcgccgctctgctcggcctggcggccgtcttcgccgtcacggccaccaccgggtcggccaaggccacgatcttcgatgagtacctcgagaagagcaaggccaacaaggagctgaacgacaagaagaggctggccaccagtggagccaactttgcgcgcgcctacaccgtggagttcggcagctgccagttcccctaaaacttcactgggtgccagg

SEQ ID NO: 18005 - DNA, 355 bp, Zea mays
  Clone ID: LIB84-021-Q1-E1-E1
actggaacagcttctggtggatgagggaattaactgcgagatagtccgatcagtgcttatggagcgtgcaaactgcccttatctagcagcacaaacagcgaccgaaatggaagcattttcgagaacagaaacatttcaaaaaatcgttgaagcgtattcaaggccaacaaggatcatccgtggaaaagaaattgagtctgctttggaggttgacccacacgtatttgagaaagatgaagagaaagttttgtggagcgcctacttggacgttgctgataagatccatcctggtgttgatattaacacctttgtggatgcctctcttatcctgatacaacccctagaagatttcttc

SEQ ID NO: 18006 - DNA, 412 bp, Zea mays
  Clone ID: LIB84-021-Q1-E1-E11
agtcccgactccgaaatccgaatccatggccgtcctccgcgcgtcgccgccgccctttctcccccatccgctctcgcgcccctctcagtgcaagcggcgccccacctgccgcgtggtcgcagccacagccagacccagtcctgctccttccaggcccaggagcggcggcgtccatggaggccgccccaagagggggcttcttgcggcaaggagaaggccgggggaggggcgggtgccctgcttgcgtgccgcggaggcgggggtcggtgcggcaggcgtcgcgaaggaggaagacgagtacctggcgcgggaggccgggtggggcgtgcggcggatggcacgggttggggacgagatgcggcgggtggcgcaggtccaggccgagggcttccacgtccccgtcgcgctcttc

SEQ ID NO: 18007 - DNA, 312 bp, Zea mays
  Clone ID: LIB84-021-Q1-E1-E12
cttgctctgatagcttgctccaggacgtacgtacgtacgtagatcgatccatcgatcgctagctagctgacgaccatggcgtccctctcctctgccgccatcaccgccccttccttcacggccgcgcccgctcgcgcagtggtcagcaggaggtccttcaccgtgcgtgcctctctccgcaaggccactgccaccgccgccgtggccgttgccgccagcgtcctgcttgccggcggcggcgccatggcccaggaggtgctgctgggcgcatgcgacggcgggctcctcttcgagcccagccagttcaccgtc

SEQ ID NO: 18008 - DNA, 373 bp, Zea mays
  Clone ID: LIB84-021-Q1-E1-E2
cccacgcgtccgcccacgcgtccgcccacgcgtccgcggacgcgtgggctgcggctacagtggtggcggcggcggctactgtggtggtggcggcggctacggcggtggcaaccgtggcggcggctacggcaactcccacgggaactggaggaactgagcggtggggcccgcgcggccaagttatcctgttcgctaccgtgttgtttaccctagtccagagtgtttatcttcgttcgtctcgtgtttgttgttgcccatctgtgtttttgattgaaggtcgctctgtgtcagttgttactgctgtgttcatcctcggctccagcacacccatgcatcaaccagcatggactgcggatcaatgggtgctgttacc

SEQ ID NO: 18009 - DNA, 399 bp, Zea mays
  Clone ID: LIB84-021-Q1-E1-E3
aaggggccgcaagcgtgagaggtcagtgagcagagctgcagctgatggtgacggtatggagatagatggccagcaatccaacaagaaactgcgtcgtacatcaacgtcgaggtcgatgtcacgggctcctgaagaggtcattcctgcagaaggattcaaggactctgagcagaacaagaaggctatcaagaaagcaaaggcctctacaaagaacatgaacaaggatgctcgccgtggagaggctgaccgtgttattcctactttgaaaccaaagcatctgttctctgggaaacgcactcttggaaagacaagcacgcgataagctcagcacctcactgcatctggtaataaaggactggtgcactgttggtttgatcaaatttatgaaacgggtgtttt

SEQ ID NO: 18010 - DNA, 390 bp, Zea mays
  Clone ID: LIB84-021-Q1-E1-E5
aattgcattttggaagaaggcgaacctgatattccttttcttcctgctccggaagctcatactgcctttctactccttcacgctgttctgcatcatcctcccgatgacgatgttcgtgccggaggccgagctccccgactgggtggtgtgctacgtcccggccctgatgtccctgctgaacatcctgccgtcccccaagtcgttccccttcatcatcccgtacctgctcttcgagaacaccatgtccgtgaccaagttcaacgcgatgatctccgggctattccagctggggagcgcgtacgagtgggtggtgaccaagaagtcgggccgctcgtcggagggcgacctcatcgcgctggccccgcccaaggagcccgtgaagcttcacgc

SEQ ID NO: 18011 - DNA, 336 bp, Zea mays
  Clone ID: LIB84-021-Q1-E1-E6
gccaaaccctagccgccgagtgccgcccaccgcccgcccgccctccgccgcgcgtcggacggtgccgagggaagaggcaccatgaggttggagaagtgctggttctgctcctctaccatctaccccggccatggaatccagttcgtccgcaacgacgccaaggtcttccgcttttgccggtcaaagtgccatacaaacttcaagatgaagaggaaccctcgtaaggttaagtggacaaaagcatacacgcatttgcatggcaacgacatgacccaggatacaacctttgagtttgagatgaacaggaacaggccggagcgctacgaccgcaattta

SEQ ID NO: 18012 - DNA, 403 bp, Zea mays
  Clone ID: LIB84-021-Q1-E1-E7
aagcacaagcatcaacattgctattccaatagataatgttatacatattatccataaaacaaagacgaacttgtgtaggctcactgcaacaaaaaggaatgaaacgatactgaaccacgcatgagttcaccataaggtacgcaaagacaaaacacagtaatacttcttgatattggtttatgcagttcacattccatttcatcttctactgggaaggaatgggctgcatctctggtgctgcagcaacgtcagccacggggtacctgaacacgcgggcgagccgctcagtgggcaccagcgggagataggtggccacggcgttcccgcgcttggcaccatcacgcaccgccgaattgtacctggcagagagctgtgcggcagtggggacgaccgccctggtgac

SEQ ID NO: 18013 - DNA, 389 bp, Zea mays
  Clone ID: LIB84-021-Q1-E1-E8
gtctattccattccaggaagagtacgcggagggcgaagaggttgggaggctgccatgcgagcaccggtaccatgtgtgctgcataggccactggcttgggcagaagaactggtgtccagtatgcaaagcgtctgccgtgccttccaagggctgaagcattggggatgctggaaaccccgttccggattacaaaccatccttgcttttgtctacgtacattgttcttttccctatatgcattagatatagatcatgtctagatgtatgacgctagaacagcttgcgatttgggaggaagctaagagagtaatagttagctggttaataatagttcatagctaatatttgccagataactattacttgggtacctaatagctgtgcccttc

SEQ ID NO: 18014 - DNA, 391 bp, Zea mays
  Clone ID: LIB84-021-Q1-E1-F1
acggacgcgtgggcggacgcgtgggggctaacagttgctgatgtagcctcccatatccagcatgagattcagtatggaggtgacaatgcatcagcctctccaaggtcacaataccctagccaaagcactgcaccgacaatgcacattcccaacacaagcaaccagcaaccatcgccaagcttatttgctccaggaaaccctgggttgacacagtccaagaattccatggtcttttcaagcgcattatccagccccatccggcggagcctgcaaccttaccacctagagcaggacggggatgcacggtacttcgcgaacggtgcaagccgcgatgtgaaccccacggcttcgaatgattcgtccatggacatgcactcggacaacccaactc

SEQ ID NO: 18015 - DNA, 90 bp, Zea mays
  Clone ID: LIB84-021-Q1-E1-F11
acccacgcgtccgaaaaaaaaacaaaaaaaaaaaaaaaaaacaaaataatctaaaaaaaactaagataaaaacaacgccatacacagaaa

SEQ ID NO: 18016 - DNA, 357 bp, Zea mays
  Clone ID: LIB84-021-Q1-E1-F12
ccaaatttgaggataagcacatcaagtgatgttacaggagtagaaatcgcaggtgccctgaagaacgttcttgcaatagctgcaggtatagtggaaggcatgagtctcgggaacaactgtatggctgcccttgttgcccaaggctgttcagagatacggtggttggcgacgaagatgggagcaaagccaaccactctttctggcttgtctgggtccggtgacatcatgctcacatgcttcgtcaacctttcgcggaatagaacagtgggactacgcctcggttctggtgaaaagcttgacagaatcatgggttctatgaatcaggttgctgaaggcgtatcaactgctggggctgtc

SEQ ID NO: 18017 - DNA, 389 bp, Zea mays
  Clone ID: LIB84-021-Q1-E1-F5
ccggcaccacctgtgcggcctgtcatggcacttggaagaggagggaggaaggactcaagaggttaaggtacggtatttatagatttggctgaagaaactggttgttgctattatgaagactaagacgagtaggagcttacagaagtctgggagaggtaaccatgtccaaggagaagggccaaactgggttcttgttgctggcggggttttgcttagcacgctttcagtcaaggttgtgtgcaaactaaagcagttgttagacgggaagcagcaaaataatacttccgaagctaaaggaaggcctgaagcatgcaagctgcattcagatctctaccggttcagtgaccaaactggctgctactactgtatgtcacggcttgcaaattggt

SEQ ID NO: 18018 - DNA, 378 bp, Zea mays
  Clone ID: LIB84-021-Q1-E1-F6
cgagaagttccacggcggggactcctcgtcgtcgtctgactcggacgacgagaagaagaaggggtcttcctcggcgtcggcgacggaggccatgaaagccaagatctaccgcctcttcggccgcgagaggcccgtccactctgtcctcggcggcggcaagcccgccgatcttgtcctatggaggaacaagaagatctcaggcggggtactcgctggtgccacggccatctggctcctgttcgacgttatggagtaccatctcctcaccttggtgtgccactgtctcatcgtctcgctggccatcctgttcctgtgggccaacgcctccagtttcatcaacaagtccccaacaaacattcctgaggtgaaaatccctga

SEQ ID NO: 18019 - DNA, 377 bp, Zea mays
  Clone ID: LIB84-021-Q1-E1-F7
acccacgcgtccggacgcgtgggcggacgcgtgggccgtgtgatgcagctggcgtcggagcgtgcggtggttgtgttcacgctgagcagctgctgcatgtgccacacggtgacgcagctgatggcggacctgagcgtgaacgcgctggtgcacgagctggacagcgaccccaggggcaaggacatggagcgcgcgctgctcaagatgctgggagggagggcgcccgctgtccccgccgtcttcatcggcggcaagctcgtcggcggcaccaacaatgtcatgtcgctccacctcggcggagagctcgtgcccatgctcatgaacgctggcgccctctgggtctagacaccagggcatcgcgcgcgcgcgtactcgtc

SEQ ID NO: 18020 - DNA, 372 bp, Zea mays
  Clone ID: LIB84-021-Q1-E1-F9
acgtggcggacgtgcacgtgctggacgcggcgacggggcggtggcggcgcggcgcgcccatgcggtcggcgcgctccttcttcgcgtgcgccgaggccggcggcaggatctacgtggcggggggccacgacaagcacaagaacgcgctcaagacggccgaggcctacgacgcggaggccgacgcctgggacccgctcccggacatgtcggaggagcgcgacgagtgcgacggcatggccaccgtggccggcgaccggttcctggccgtcagcgggtaccgcacggcgcggcagggcgggttcgagcgcgacgccgagtggttcgacccggcggcgccggcctggcgcatgctggagcgcgtgcgcgcgccgc

SEQ ID NO: 18021 - DNA, 381 bp, Zea mays
  unsure (1)..(381): unsure at all n locations; Clone ID: LIB84-021-Q1-E1-G1
acngacacgtgggctttacagaatgtgtcaaaattactcctacatttttgcaatctgctggtctgaatgtaaaccaagtccttacaaggtgtcttttcgctggactgtgtttccatgcataccaacaggtgtcttacatgattttggcgatggtgtctcctgtcactcattctgtgggcaactgtgttaaacgtgttgtggtcattgtaacatcagtgctgttcttcacgacacctgtttctcctatcaactccctcggtactgcgattgcacttgccggagttttcctgtactcacagctcaagcgacttaagcccaagccgaagaccgcttaaatagggattgtaattctcatctctttgtgttaatggagttaaacac

SEQ ID NO: 18022 - DNA, 221 bp, Zea mays
  Clone ID: LIB84-021-Q1-E1-G11
accacgcgtccgccaatcctcactcactcaggcctggtattttagctttgtagtatctgtctcgatctgtgtgtgtgtgtggactgtgctgttacgttatacgtgcatgtacttttaagatttctctagctaattgcatcgatcggagaggtagtcactcacgggattatgtgagtttgcaaaaatgtctatacgtatacaatttgcattgcttgacagcc

SEQ ID NO: 18023 - DNA, 374 bp, Zea mays
  Clone ID: LIB84-021-Q1-E1-G12
acccacgcgtccgcccacgcgtccgcggacgcgtgggtctcaatctctcttgtctccaagtttgtaaccctagccgccaagcttgaagctccagccgtgctcgtgtagggctgcaggccatctgggctccggcttccggcatccaccaggcgtcaatacggtgcagcgagcagcgagcagcaagtcaccgagcagccgagcgaccgccgagcacagggcaccaccgagcagccgagccaccgccgagcaccgagtcttctctgttcttctgcggcgaacaaggtcaatccagggccgtggtgcgggtgctggtttttttttccaacaagtttatgttggtcgctccgacgctgcagcaatgaagatacagaaag

SEQ ID NO: 18024 - DNA, 342 bp, Zea mays
  Clone ID: LIB84-021-Q1-E1-G4
acgtccgggcaggacaacttcttgccccggacggctactcctcttgaagacattttcaagtcgatcctctgcttgccttgcctcctaggtttgcgatgtttgacggatacatgtgtacctgaagacgctatgcttaacgattcaaggaggctttatgcaccaggccggatttatcacatagtccaaagaagaacgtgcatgtgcggcagatatccaccggtagtcaaaacagctgtgccggtggatggtacatttgagcacatagttctttcctgcaatgccaaagcggaccatgccattatttggattgagagggaggcccataacgctttggatctgatg

SEQ ID NO: 18025 - DNA, 357 bp, Zea mays
  Clone ID: LIB84-021-Q1-E1-G7
agaggagcaggcgcatatccagacattcagaggacgtattcttgagacaatcctcagccttagatttctcatgtttcagtatggcattgtgtacaagcttaaaattacagatcataatacttcccttgcagtttacggcttctcatggattgtactctttgttatggttcttcttttcaagctttttactgcaactcctaggaagtcgacagccttgccgacctttgttaggtttctgcagggcgtccttgctattgggataattgcaggaattgcccttcttatcgtgctcacatcattcactgttgctgatctaattgcaagtgcacttgcttttatagcaaccggctggtgtgt

SEQ ID NO: 18026 - DNA, 129 bp, Zea mays
  Clone ID: LIB84-021-Q1-E1-G9
aaagacagaagatacaagcaaaacgaagaagctgacacgagacgcctctcctctctttctcctttatcagagatgatgaaaatggatgtacaaaaagatgagcatcgaacgcgcgcgcgcattactact

SEQ ID NO: 18027 - DNA, 386 bp, Zea mays
  Clone ID: LIB84-021-Q1-E1-H10
aggtttctcagaaggaaaatccatctccaattcctgaatataacagtgccatagagaaggaaggtggtagcacggatgaacttgctcttgcgctgtatggaatgagctctctgccagaatttcgtccagttctttctgtcattcctgagcttccatcggagtcccaacagcagttgcttcttctgccagcggatttaaccaatcgtattttatctcgggctctcgcgagaaccattagaagactcatgtaaagccatacgtgcagaaattttcggtccctgcttaatttttattttactattctttttggttcactgctagaagatggggatttttttagcatctcatctaaaacccaagatgaatccctttttttgtaaccaacc

SEQ ID NO: 18028 - DNA, 370 bp, Zea mays
  Clone ID: LIB84-021-Q1-E1-H11
agaaccccaaggccaattatgctgcagagccttataactctggatatggcatgaatcaagcaactgctgccactgattctggttctcattatggaactggtgcaacgcatggttcttggggtgcctatgatttgcaaagggcgtccgggcgtagataagtactgcgaattcgtcaggtctttcacggaagctttggccatgcctctatgattgttgtggtggatcagatgttgaacaggtggggcacatgtatagatgaatagctcacacatttgctttagtttagcttctatcgggctgtgcaagggaacatatatctgttgcatcgagtgtcaatgtattggcagttttcgagcgagcattgaatata

SEQ ID NO: 18029 - DNA, 351 bp, Zea mays
  Clone ID: LIB84-021-Q1-E1-H9
gaaactaccttccccatgatgaacaacttcgaggaggcaagctggctccagtgtctcttcccaagtttgaagacccaattagtgccgaaactgcagagccaaaggaagtggagaacctttttggcaacatagcaccaaagaatccaaattgggatctgaaacgtgatgtgcagaagagaattgataaactggaaaggcgcacgcacaaagcgttggctgagattgcattggaacagcagagggagaacgaagccttggaggaatctcaagattgaccgacctgtataagtgaccagtgactcatggcggttggtccctcgagcagacgtcattaccttatttacataatgt

SEQ ID NO: 18030 - DNA, 269 bp, Zea mays
  Clone ID: LIB84-022-Q1-E1-A11
gcctccagtttggtcagtatcgtgcaatttgatcttgtggcacttccgccaactgtcaccatgcagaacgaggagggtaagactgtggacctctatgtccccaggaagtgctcgggcacaaacaagatcatcactgccaaggaccatgcctctgtccagatgaacattggccacatggatgcgaatggcctgtatgagcggcacttcacaacgtttgggcactctgggtgttgtcaaggcgcagggcgactcacacaacaccttggaca

SEQ ID NO: 18031 - DNA, 239 bp, Zea mays
  Clone ID: LIB84-022-Q1-E1-A12
aggacgcgtgggcggacgcgtgggttttttttttttttcctgaaagatacgattatatatgtctttcatcatatctaatgtatgtacatcgatacaatgacggacagccagtcgattcgattgatctccgcaatactacgtacaatgcaatgcagactcatcaccaccagattgcttgagctgaacaatacaatgaaggatcatcatcagtagacttcgacgttccattgctcgctcct

SEQ ID NO: 18032 - DNA, 83 bp, Zea mays
  Clone ID: LIB84-022-Q1-E1-A5
caccgaacacgttcttgggaccgccgccgccgccctacttccagtcccagctgctcaggtctccatctgcctcgagccctttg

SEQ ID NO: 18033 - DNA, 71 bp, Zea mays
  Clone ID: LIB84-022-Q1-E1-A6
aatgcacttgtatttcttgtacctgcttattgctgggactatcagccggtctcttgcacggatagcttgct

SEQ ID NO: 18034 - DNA, 168 bp, Zea mays
  Clone ID: LIB84-022-Q1-E1-A7
acgaagtttgagattgattcacacaatattattattaatcaagttagatttgatgaggaagctgtctagtcaaaactgctaaaagcacggatgagaatgcaacataaatacattagtcagtaccatatgtgaggactatgacttcgacatcaccaagcttcccttgct

SEQ ID NO: 18035 - DNA, 377 bp, Zea mays
  Clone ID: LIB84-022-Q1-E1-A8
gctatggatgtggaaaaggacgccaatgttgaaagtttggatgaggaccagagtgacagtggcaatgaagaggcagaggagtcagacgatggtgcgggtgacgttaatggtgcggaggagatgaacctgagaattggggatgtcaacgggggtgagggaatgacacattccttacagcgctgtgacacagttgggggcatggagtttgagacgctggataaacgagaggatgagatcagggatgagttaacatttgacgattttcctgcaagggcatctttggaaacgatgacatcatcaaacctcctccaagccatgaactcaattccctcatcatacaaggtgtgcggggaatgtgcatgatctgccctctgggg

SEQ ID NO: 18036 - DNA, 326 bp, Zea mays
  Clone ID: LIB84-022-Q1-E1-B11
acatccagattgtgctccacgagacagatggacgccgggggctcggggatgatgaaggagacgacgaagacggtgaggacctcgtcatcgtcgccgactgaccacacatcaccgggatcgatgagcatgattggggagaggacccagtagcggcatgggcacaatgagagcgaaaggacggacgtgagccctgtaagacagccgcggcacctgtgtggaacgatccggtacagtagcggcggccaagggttccatcaacagcaccattccatgtccaaggtcagttacttgggccaagaggccgtacgatacactctggccacccc

SEQ ID NO: 18037 - DNA, 415 bp, Zea mays
  Clone ID: LIB84-022-Q1-E1-B12
attcctgattattgtcctcttcctgctggtcatagtctgtggtgaggtttctctggtcctgacctacatgcacctttgcgtggaggactggtaatggtggtggaaggccttctttgcttctggatctgtctcattctatgtgttcctctactctattaactacctgctgttcgatctcaggagcctgagcggaccagtttctgccacactctaccttggctattcactgatcatgcgccttgcaatcatgctctccactggcgccattggtttcatgctctccatctacgtcgtccactacctcttcgcgtctgttaagattgactacaggtgtggcccgctgcctctttctggaatatagtcatccgatcaagggaatagttaccctcttataaataatacacaataaatcaaa

SEQ ID NO: 18038 - DNA, 314 bp, Zea mays
  Clone ID: LIB84-022-Q1-E1-B2
agaggaagcagcgcgtcctcgcctaaagccctcgccgccctctttcggctcctcgcctctcgtccacgcgcgacgacgtgtcggcaaacagtgagtccatcgcaggactcgcgagaggagggtgggcgcgtggtgggctctgcagggcgcggcgattccggcgctggtggcgggtcagtttgtgcgcatcaagcagcgccgcgacgaggagcagcgcgtcaaagcggcggcgcgggcgggagaagagctccgacgatgtagtcgtctgcgagcgcgtgtgcacctccaagcctatgctcaacaatgtaagggcc

SEQ ID NO: 18039 - DNA, 183 bp, Zea mays
  Clone ID: LIB84-022-Q1-E1-B3
acccacgcatccggtcggtgaaggactcggcgtcgttcttgggtgttcgtctcgcggcggatggcctcaagctggccaccaccgctctggggcgacgcaccgtgagggtgagcacgtggagggagagccgcgcggaggcgggaggcgtctcctccccgtcagtgacgcccgcgtcgccgtcgg

SEQ ID NO: 18040 - DNA, 327 bp, Zea mays
  Clone ID: LIB84-022-Q1-E1-B8
acccacgcgtccgcccacgcgtccgcggattgctccccaagacaagcccaaatctgggaccataaacaaaccgcacccgagcggccgcaaatcgggatcggacggcaattccgcaaggcgacgccatcgcaggggttggcgttagcacgaccacgacagtgacagcggccggggccgcgacggtgtccctcagctcactggtggcgggggcgagggggcgcagtgcgccacgcgacgggtggtgcagtcccgctggcacacggacgaagtcgagcccggccgatttgtccgcaagtgcgacaagacggagcagcgcgtccgcgactg

SEQ ID NO: 18041 - DNA, 258 bp, Zea mays
  Clone ID: LIB84-022-Q1-E1-B9
caactgtggaacaacacaacactgtcgaagtgccacacgcggctcctgtaaaggaacctgatgctgttgctcagataagtgagaccatgcaggaacagatcatttctactgaaagccatggcaatgcacaacgcaagcaacagataaggtgcaatgagtgtgatgtacacatggaggacaaacgttacatagatcacagctcgagttggtgggacaaacacaactggagactccacataaaatggggcccgcctctca

SEQ ID NO: 18042 - DNA, 317 bp, Zea mays
  Clone ID: LIB84-022-Q1-E1-C2
cgcgtccacactcagcgctagctgaggacggtacagcggcacagaggtgcgacgtacgacgacgacgacgcaggcgccacacatggcatcccagctctgccgccgccgtaggcgggttccacgggctcggtggcgacgccgggccgatgtcacgcgtggcagcgctggcgtccgtgagggtgggcaaggagaggtcgtcgtcgcagggcatccgctgcgactagatcgggtccgcaggaaagtgatcatggtgaccacgacgatgctcatgctattcgccgggcggttcgggctggcgccgtcagcgaaccgcaagg

SEQ ID NO: 18043 - DNA, 202 bp, Zea mays
  Clone ID: LIB84-022-Q1-E1-C7
cggagacagcctggaggagttcctgaccaaggcgacgccggacaagaacctcatcaggctgctcatctgcatgggggacgccagggggacgatcgcagtcaaagtccgcgcagcgtcctgcggcgagagcgcctgtgtcaagtccttcggcgacgagcagctggccgtcgacaggcgcgctaacaggctgctctttgaggct

SEQ ID NO: 18044 - DNA, 330 bp, Zea mays
  Clone ID: LIB84-022-Q1-E1-C8
aacagggtcaagcttctccataagaaacaatggaaggatgagatccgcacgttgaaggagatgaagaagagggggaaaactgatcgggatcattatggctatgctaatatcgctggtcggaacgatcaggatcctcctccagagaatgtatcagttcccttgcctgacatggtgcgtcccccttcatttgagtatcacaatcccacatacccgtgccgctttttggagtgcacctcaactgtcctatcaacgcctattttggatgcgcatggatgggatcatgactgtggttatgatggagtgagccttgaagagacactggctatcctt

SEQ ID NO: 18045 - DNA, 340 bp, Zea mays
  Clone ID: LIB84-022-Q1-E1-D1
acccacgcgtccgacccaatctcccctagaccagaaaaattcccagttctttggtccgcgtcagagaggcggcggcgatgtctgggcgctgggagggcggcgaaggtctgggcaagggcggcgcgaagcgccagcggaaggtggtccgcgacaacatccagggcatcaccaagccggcgatggggaggctggctaggaggggtggcgtgaagcgcatcgcggggctcatctacgacgagacccgcggcgtgctcaagatctgttctcagaacgtcatccgcgacgccgtcacctacaccgagcacgcgcgccgcaagaagggtgacgccatggacgtcgt

SEQ ID NO: 18046 - DNA, 108 bp, Zea mays
  Clone ID: LIB84-022-Q1-E1-E6
cctcagtgtcacagctcacaagagcccgtcgtcagtcgtcagtcgtcacactagctcgtcagaacctacaaggacgcggcagttggtgcgtacgagcagacgtacgca

SEQ ID NO: 18047 - DNA, 296 bp, Zea mays
  Clone ID: LIB84-022-Q1-E1-E8
agtacctcttcaagtacatcatcatcagcgacacaggcgtcggcaagtcgtgcctgctgctgcagttcaccgacaagcgcttccagcccgtggacgagcggagcatcggcgtggagtgcgggaggccgggggatgatcagcgacaagcaagccatcaagctccagatttgggatacggcttgtgaagagtcatgcaggtccataactagatcataggagagacgcgcggcgggtgctctgctggtctatgagatcactaggaggcagactttcaagcaccttgcaaggctggctgg

SEQ ID NO: 18048 - DNA, 323 bp, Zea mays
  Clone ID: LIB84-022-Q1-E1-F12
cccacgcgtccgtgagcttctcccgacctttggtcaggcaaaggaggcggccaacaacgacgagcgatcgtgaccaatgtcatctgcttcctggtgctcgcatccgtgctcctcgccgtcgcttttcccgtgtctgctctgcggcagcaggtgaagaagggcggcggcggtgaacgcggacgcggacgcagtgttagcggaagcggaggcggcaacctgaatccctgggagtgctcgcccaagtgcgggtcgcggtgctccaagacgcagtacaggaaggcctgcctcaccttatgcaacaagtgctgcgccaagtgcctctg

SEQ ID NO: 18049 - DNA, 175 bp, Zea mays
  Clone ID: LIB84-022-Q1-E1-F3
acggacacgtggggcaccttttagcacaatatttcggacagtattgtgaccctatatatttcctaccaaacttaatttattaagttattgtggtcctacagttcagtttagtggcgccggacgagatttacgcgagacatatgtgatcttgtttttgtgttcctatcatgaatgg

SEQ ID NO: 18050 - DNA, 299 bp, Zea mays
  Clone ID: LIB84-022-Q1-E1-F4
aagatagatgagggcgcaccactggtcaatttgactcgatcctcggatgacaagatcgactgctgccgcttttctatgggtcgcatgaggcggttcctgtttggcagggtggggaaagggcgcgaagttcgtacggttgtctggagcataagcgattgggagacaagtgagtacagaacacgtcgggggaaacctatggcggcgggcgcacttaccgtggatgggaagtatctggcattacgaagccaccgagggtgacttctgtgctgttgaagtgaacaaaatggaagtttctcact

SEQ ID NO: 18051 - DNA, 307 bp, Zea mays
  Clone ID: LIB84-022-Q1-E1-F6
atgcagatattcatactctatttagagacgtacaccagaaatggattgagggagggaactatgagctttgcatagaacacgtgacgggatgaaatctgggacatggtgaaacgcaggggtcctctcaggctcgcgctatgagaccttcgttcttgcaagcaaggtgggactgtcgcgatcatgcttagatagctgggtggcttctgcgcgcaccagaagacggataaccgtctccaggaagaggaagagcaagtggaagaggcatgagttctccagctgccaagtaagcgtacctggtgcctcaaaa

SEQ ID NO: 18052 - DNA, 314 bp, Zea mays
  Clone ID: LIB84-022-Q1-E1-F8
acgtcaagtcgacgacaaggtcgtcaaggcccagatctgggacaccgccggtcaggaaaggtaccgtgctatcacgagcgcgtactaccgcggggcagtacgggcgctcgtcgtctaggaggtcagcgtgcacagcgagttcgagaaggtggagaggtggatgagggagctcagggaccacgcggacgccaacatcgggatgatgctggttgggaggagggtggacctgcggcaagtcagggctgtcccgaccgaggacgccaaggcctttgccgagagggagaacgccttcttcatggagacgtcggccctgg

SEQ ID NO: 18053 - DNA, 323 bp, Zea mays
  Clone ID: LIB84-022-Q1-E1-G11
acccgtccaagaaccgacgacaccgagccgctgtcgttgcagactaggcacctgataccgccggcgaagcagcggagcctcgacaccgagcgcgcggaggtgcgcgtgaacgtcgtagagacagcggcggcgccaagcgacgtcctccaagacagcttctcgttcccaaggctgcttcgtcctcgccatgtgccggacaagttaagtggccagcagtctgcttacttacacagactgtcctatatagagatagtagaatagtagtttcaagttataaggtcgatttggctagttatacaacttttgttagttatttagataaa

SEQ ID NO: 18054 - DNA, 292 bp, Zea mays
  Clone ID: LIB84-022-Q1-E1-G12
ccaccgaaagaaatcattcgcaagattgaggaacctgcaaaacctctacgatttggtgtccacacgaacaactacaacttgacgctagagaaagtaaaaccagggaggaagggaaacctgaatgttgctacggagatactacaggttgcgccctcccttcataaggtacaagtccggaaagcaaaaggcgacactctggaattccaaaagttctacaagaacctttccaagaccttaaaggaccttttccggaaatctcaagacctgcaaatgcgaccggcttcttaacatc

SEQ ID NO: 18055 - DNA, 319 bp, Zea mays
  Clone ID: LIB84-022-Q1-E1-G3
aagctgttctcggccatggtggtgcgcaggccggcgcacctgttcctggacgagctgggcgtgggctacgacgaggccgaggagctacgtggggggcaagcaggcggcgctgttcaggtcggccgggatgaggcggcgcctggcgcggggcaacgtgaagctgttcaacgccgtggcggtggaggacctgatcgtgcggcaggggcgcgtcggcggcgtgggcacgaactggggcgctcggtgtccatgaaccactgacacgcaagtcgtacatggaccccaacgtcatggagggcgcaggtggtggtcagctcctgcg

SEQ ID NO: 18056 - DNA, 79 bp, Zea mays
  Clone ID: LIB84-022-Q1-E1-G5
acctcgtcggcctccgccaacctctgctacgtctgctcccgcagcctcctcgacaacttccgcttctgctccctcggct

SEQ ID NO: 18057 - DNA, 318 bp, Zea mays
  Clone ID: LIB84-022-Q1-E1-G6
gccgagccaagcgtcaagcctcccctccgcaccatgccgcggcgtcgggcgaccgggcgcgggacttggcggcgtccccgaccagctcgcgctccgtgactcagacggtcaagctgtcccaccgcttggtgatcgagggctacgtggcgcgcgaaaggcaggggcgtcgggaagcacatcgccagcgacaccgtcaccgtccgcggctagcagtgggcgatctacgtcgacgcagacgggaagaatgccgaggagaactccggctacgtcgcagtcttcagcgcgctcgcgtccgaccgcaccgacgtgcgcgcgctc

SEQ ID NO: 18058 - DNA, 324 bp, Zea mays
  Clone ID: LIB84-022-Q1-E1-G8
acccacgcgtccgcccacgcgtccgcccacgcgtccggtcacttccgcacttctgcaagagagaagggtcaggttcatccagcgacgcgctggatgcggtagattgctactcctaggacgagcctttgcgcgagcagctgtacagctacatgaagcagcagcaatctctgaatcaggactccgttggtcccagaggagaaggctcggtcgaggtggaggtgccctcgcctggccttgatgaggccaagattgcggagacgatgaaaggagagctccagaatttgaggggaaccggcggtcccgctcattcatgcggcagcatcc

SEQ ID NO: 18059 - DNA, 176 bp, Zea mays
  Clone ID: LIB84-022-Q1-E1-H1
acatggatactgcttgccatagaagtttgaagattgtacatttgagtggctctactggccccaaccccgtgagccattcaatgatgaaaccattgaatacagcagatcactcgatgctgaggaaggcatcacgcttctcaagatccatgggtgggaactgcctccacggtgtgctc

SEQ ID NO: 18060 - DNA, 198 bp, Zea mays
  Clone ID: LIB84-022-Q1-E1-H3
acgcgtccaggcaaaagatggatctcttcacaagaggagacaagctctggcatttatttatgagaagcatatcgtccatgccttgtttgctgaggttgcagacaggtatggagaccgagaaaggggcggcacaaggatcatgccgacgttcccaaggcggggagataatgcacctatggcgtacattgagcgtgttta

SEQ ID NO: 18061 - DNA, 175 bp, Zea mays
  Clone ID: LIB84-022-Q1-E1-H5
acccacgcgtccgggctccactcttcctgattcagagagtaattgcctggtgaagccaccacccacttgcactcctgaggcttcgcgtggtaatgtgggtgacagcattggatcgggaagtgacacagaggggatatgtggtggatgatgaccttgacgttgttggtgttgtgac

SEQ ID NO: 18062 - DNA, 337 bp, Zea mays
  Clone ID: LIB84-022-Q1-E1-H6
agcggacgcgtggggcagcaagaatgaaagaagctagcgcttatagcttgtcagccatggccaccgccgccgcgtctagcctcctcgggtcctccgtcgggtgctcccggctcccagccgccacgcagacgacacccacggccctcgtggtggccatcggcccgcgcggcgctggcgcggagcccatctgcgcgtccatgtccatgtcctcggcgagggcgccctacgaccggacgtccgtccggttcagccccatcaaggagtccatcgtgtcccgcgagatgacccgtcgctacatgaccgacattatcacctacggcgacaccgacgtcgtcat

SEQ ID NO: 18063 - DNA, 322 bp, Zea mays
  Clone ID: LIB84-022-Q1-E1-H7
agtggcgaaacccgccgcagcttccactgaccactgctccacaggctcatatccgattccgatcctaagacctcagctgctgcgagagtcacagccgggtcaagcgctgggaagtggcacgggcacgggatgtgtctagagcactcgctaccttctcttgatttcccccctgaggtccctgaccaagggtcctgtcggccatggatgcggtgcgaagctctgcagtcagcgccacgccttttggtccgccgtccgatcgcgaccgctagacacgacgcctgcgttgccttcccggctgaatcgccgattccctgtggggcct

SEQ ID NO: 18064 - DNA, 293 bp, Zea mays
  Clone ID: LIB84-022-Q1-E1-H8
catcggcaagcacatcttcgtctgcgccagtattgacgggaagctgtgtatgcgggcgtatacgcccacgagcatggtggacgagatcgggcacttccggctcctcgtcaagcggcagggcaagagcgagcatcccaggttccccaacggttggctcatgacccagtacctcgaggcgcgtcccgtcggctcggagatcgacgtcaaaggcgcgcgtgtccacgtggagtccagccgtcgcggcagcttcgtcattaacgccaagcagcgccatgccagccgcctcgccatga

SEQ ID NO: 18065 - DNA, 192 bp, Zea mays
  Clone ID: LIB84-023-Q1-E1-A10
gcgagcgatccatgtctacacgtacacgaggcagcagcaccaagaagcagccgcatcatggcacgcagcgcaaagcgatggagtcgctcaccatgatggcgtccgtcgccgccgtggcggtggccgcgctctcgcgccacggcagcttcgccgtggtcaagtccgccaagggcgacctctgcgaggagcccg

SEQ ID NO: 18066 - DNA, 372 bp, Zea mays
  Clone ID: LIB84-023-Q1-E1-A11
gggccggcccacgcgtccaccttggccgtggaaccggagataacaactttggattgccttctggaacctacgtgaggagcaactcaactggtacaattggcgagccattttctgcatcagccaatccatatgaatcgaacaatctaggtgcatatggcagcagttctatttatggtgactccacctggaggttcaactcatctgaggttgatatacctccttttggtcatgatcttggaaatgttgatccagatattaaatcagaaatatcagcaaactatatgggcaactatactgttaataataatcaaacaagcattagctacatacttttcttggaggacacttcagaattcatataaagtgcaacta

SEQ ID NO: 18067 - DNA, 314 bp, Zea mays
  Clone ID: LIB84-023-Q1-E1-A12
ccgggccggaccacgcgtcaagctagtgcattatggtggaaatttttgggtctttattgagtgtcggggcagtgtaagtacgtgaaaatcgtaccatattatcaaacaagtaattcatgatccagcatcggaggtggccatgtgggttcgtttttcttccgagggcctaagaatgcatcataacagaggaacgctcatctttagaagtttttgagcactatcatcaacctaggacgcaggtatgttttcgtaagttcttaaatcgagcgtcgtgtaagatcctttgagttgattgttgtaccctcgtatctcct

SEQ ID NO: 18068 - DNA, 285 bp, Zea mays
  Clone ID: LIB84-023-Q1-E1-A2
gggtcacgcacaactccttcgaggaccggacgccgtcgtggacgccgtatcacctcaaggcggacgacgtgggcgagacgctgcaggcctccgggacgtgcgcgttcgacgactgccactggctcaacatcgctgcccggcctgatggcctcatgtgtggcaagcacgcctagttatagtatctgtgggagaaactggactcacgtatataagtgtgctgtgtacatagtgcggtgatgccatcttgtctgcttgcatatgcatactactgaacatatgatgatg

SEQ ID NO: 18069 - DNA, 323 bp, Zea mays
  Clone ID: LIB84-023-Q1-E1-A3
tccgcccacgcgtccggacctaaagccggaaaacttgttacttgattcaaagtataatgtaaaacttgcggattttggtctgagcaatgtcatgcatgatggccattttctgaagactagctgtgggagtccgaactatgctgctccagaggtaatatctgggaaactatatgctggacctgaggtcgatgtatggaattgtggggtgattctttatgctcttctttgtggaactcctccatttgatgatgagaatattcccaatctgttcaaaaaaattaagggaggtatctacacacttccaagtcatttgtctgctttgg

SEQ ID NO: 18070 - DNA, 270 bp, Zea mays
  Clone ID: LIB84-023-Q1-E1-A5
gtccagccacgcgtccggtagcgaagaggtttaagctggcgacaggagcgttccaactcaaatacaaggacgacgaggacgagtgggtgatcctggcgaacgacgccgacctccaggagtgcgtggacgtcctggactcgatcagctcgcgcagcgtgcagctgcaggtgcgcgacctcccctgcctcgtcagcagctcgggcaccagcagctgcggcttgcacgtgggatgaagcgcgtacctcaggacagcaggatggaagcccgggt

SEQ ID NO: 18071 - DNA, 336 bp, Zea mays
  Clone ID: LIB84-023-Q1-E1-A7
gggccgacccaaacgtcaagtggttacactacctacgcttgccaaccaactttcctagcaagctagtgtgttgccctctgcagtatcacatacagttttcatcagaatagttgattcagctgacttgtcttcattgaaaggtatgcctgccgaggaatgcatcccaactaccagacctggtaacttcagaactaatgtgtgccatggaagtagggaacatgtggatccatatgcggcacagtctactgatacccacggtacctcagactcaggacttcacccaatttgcagtcctgctaacattggagatggcttttatgaagctaccgggccttg

SEQ ID NO: 18072 - DNA, 377 bp, Zea mays
  Clone ID: LIB84-023-Q1-E1-A8
acccacgcgtccgcccacgcgtccgtgactgacatggatagcaccaacgtgtatgcttacatctcaataatcgctctaattgtttgcattccacctgcattgatctttgaagggcccaagctaatgcagcatggatttagtgatgccattgcaaaagtaggtttgacaaagtttgtcagtgacctattcttggttggactgttctaccatctgtataaccagattgctacaaacaccttggagcgagtggctcctctgacacatgctgtcggcaatgtgttgaaacgtgtttttgtcatcggtttctcaatcattgtttttggcaacaaaattagcacacaaactggaattggcacgtccattgccctagctggtgt

SEQ ID NO: 18073 - DNA, 309 bp, Zea mays
  Clone ID: LIB84-023-Q1-E1-B1
tgttggtttactgagtggcactgacactgtgcgtgtggtctcagatgttaaacctgctcgtcttccctgtgtttgcagcaccccggactacatcacgccggagatgccgcaggtggccaacgagttcgacgacgacgacaaggtggggaagatggttttttattctctttttttgagcgtgggtatatcatatatcatatatgccagtgcagtggtagtgtgctgccttgttgagctccactgtttgtttggtttcgtgcatgagaccatcccctgcccaaaatctccggagaagtcagcgaaccctcg

SEQ ID NO: 18074 - DNA, 352 bp, Zea mays
  Clone ID: LIB84-023-Q1-E1-B10
ccgggccggaccacgcgtcaacgcatcaaggcccctggcgtctcccgaaaatccaaagggccccctcccccgcgcctccgcggggaccttgttaacaatctgggccgcatccaggggggcattctgcaaagggcgagcccggttcgttctcgacctttcgtctcgctctcgcccgcccgcccgaccccgcggagccctagcctagccttgccccgatcgcggattccccctcgggcgccgcgcgcccgcacccgcgatgatgaactgcgacggatgcggagaccccgtggaggacttcctgatctccggctccgtcgactacgaagatctagccatcttctgcgaccgacgg

SEQ ID NO: 18075 - DNA, 325 bp, Zea mays
  Clone ID: LIB84-023-Q1-E1-B2
cgatctacgactactactagctggtacacatactagccagcctgccaaccagcttgccatggcgcccaccgtgatgatggcctcgtcggcaaccgccgtcgccccgttccagggtctcaagtccgccgccagcctccccgtcgcccgccgcagcaccaggagcctcggcaacgtcagcaaccgcgggaggatccggtgcatgcaggtgtggccggcctacggcaacaagaagttctagacgccgtcgtacctgccggccgctgtccacgggcgaactgctgaagcaagtggactacctgctgcacaacggctgggtaccccgcct

SEQ ID NO: 18076 - DNA, 368 bp, Zea mays
  Clone ID: LIB84-023-Q1-E1-B3
cgtccacccacacgtctgcccacgcgtccgcccacgcgtccggcaccgtcaggaacccagatgacccgaagaacgcgcacctcaaggcgctggacggcgccgccgagcggctgatcctctgcaaggccgatctgctggactacgacgccatctgccgcgccgtgcagggctgctagggcgtcttccacaccgcctcccccgtcaccgacgacccggagcaaatggtggagccggcggtgcgcggcaccgagtacgtgatcaacgcggcggcggaggccggcaccgtgcggccggtggtgttcacgtcgtccatcggcgccgtgaccatggaccccaagcgcggggccgacctcctggtcgacgagtcc

SEQ ID NO: 18077 - DNA, 199 bp, Zea mays
  Clone ID: LIB84-023-Q1-E1-B4
caaaaaacatacgtatgacctacagaccatcaaaaagattcagcagaaaagatctgtcgcaaaacgcatgggcttgaaggacctgaaaatgggatataacattgacatccattattacagcgtgaggcttaaagctgcacacaagtttcttaaagccaggggaccatgttaagataattgtgaacctgaaaggaccgga

SEQ ID NO: 18078 - DNA, 254 bp, Zea mays
  Clone ID: LIB84-023-Q1-E1-B5
cgcctccgcccatacgtctggtggattttggatcgatatggcttggctatagttttgtcctgctgttgacggcgttcagtgccggtgggatcggccttcctacatgtctaagtaacttttcgaaagcattctagtcaccatggtcagtctgagctatcagatacttgacactcaactataccttcccaaatgtcagcgttgacctccctgaatcactattgccgtctctcgcatctacaacgagttgatgcgat

SEQ ID NO: 18079 - DNA, 338 bp, Zea mays
  Clone ID: LIB84-023-Q1-E1-B7
acccacgcgtacgcggacgcgtgggcggacgcgtgggctttactcagagtctagaactagctttttgctttgctcaccacacaaacggcatcagatggcgtctaccatcatggtagctacctcccgcatcagtcgcggacaagacgccgtttcttggccagggtcgctccgccgcggccgcctccaatgccagccccctccgcgacgtcgccgccgccgctgctggcgggcggatcaccatgggcaacgacctgtggtacggcccggcccgcgtcaaggtacctgggctccttctccgcccagaccgccctctgtactgaccggcgagtttcccggcg

SEQ ID NO: 18080 - DNA, 379 bp, Zea mays
  Clone ID: LIB84-023-Q1-E1-B8
actcaccaccgcctgtgaacgaagctgaatctggaaccctggagagtggagagtgactgggagtgggagataaccgtgcagaaacccccgacgagtgactcgcatcgccggccggctcctcgccgcttgtgaactgaatcacggtacatgtaaaactgaatctggcagagcacacacgcgcctaagcctattagcgtctatagacttcgcagggctatgtatagtagatatgtagattgagaccctgctgagcatgtacgtgcagtatgttcctagtcacttgtgtatcattactagtaatgcagtatccctcgtgaaataaacgtcaaaaccccttcctgctgcttcaagagaagcatacaaaaaaggcgggcgctct

SEQ ID NO: 18081 - DNA, 327 bp, Zea mays
  Clone ID: LIB84-023-Q1-E1-C10
ccgggccggcccacgcgtccacaaggtttatgttggtaatcttgcgaagactgtaacaaccgaagttcttaaaaacttcttctccgaaaaggggaatatcctcagtgcaacagtctcccacattccggggacctccaagtcaaaggggtatggctttgtcacattctcttctgacgaagaagttgaagctgctgttgcgactttcaataacgcggaattggaaggacaactcattcctgtgaatagagcttagattatcacaaatttgcaggggcacccgatgatggggaatatcttggcgaagacatgtcgtaagaggggatgttt

SEQ ID NO: 18082 - DNA, 361 bp, Zea mays
  Clone ID: LIB84-023-Q1-E1-C11
acagcaaccaacaagtcgtccaacgtccaggcttttctgttttgtttctctctcacgcaagtcgcaaagcaaagcgtcccccaccatggcttccacgacgacgacggcatccaacaacctggcgggcgtgtggctcggcgagctctcgtcggcgctgcatgggacgtggcaggcggtggccgtggccgccacccacgggctcggcgaggacgacgacccgcggctgccgtgccagcagcagcagaggccgtggcgaggcgacgacaggagcagcagcaacaacaaggcgttgcgaggagccgcggtggccgggacggacaggccggagggggacgtcgcgaggtgcggcggggccatgtcc

SEQ ID NO: 18083 - DNA, 346 bp, Zea mays
  Clone ID: LIB84-023-Q1-E1-C12
ccgtaatcctcctctagggcaggttcgccggccggaacgcgcgtgatcgtgcgcgtgttcgcgatggcatccgcgaccgtcgttatgggcactgcctcctcgccggtctggacaagtaccccaggacggtgattcgcaaggactccaccaagaacacagcgaagtactcccgcgtcaagtgtttcatcaagctcgtcaatttcactcatctcatgcgcacccgccacaccctcggcgtcaatttcaaagacgtcgcctcgggcgggcccgacacgctctccacacgggacaagatggtcgaagcctgcaaggcctccaatgttcgcctcgatgagacgttcaagac

SEQ ID NO: 18084 - DNA, 327 bp, Zea mays
  Clone ID: LIB84-023-Q1-E1-C2
tgggcggacgcgtggggtggcaccaaattctgttgagcaagcagacgtctcttatgaatcaaaggaggttcagaacttcacctatcagaagcagcctgttgaacttggcaagcaagatacacagttaaaattcagtgtagatgctgctgctgaaaatagctcagctccagttcaaacagttccgctatctgtcggtggcgcaaaacaacatagtgcagctaacagacaaacgcgacagcatgttaaggctcaaaccaatggagcaagtggctactcaaatgagagcaaaggtagcgaaggcaagaatgatgttgtccatcaatcagc

SEQ ID NO: 18085 - DNA, 87 bp, Zea mays
  Clone ID: LIB84-023-Q1-E1-C3
gttgttaggaacgtatttgtgtaatgaattctgcaaagtatgatctcaactgcagttgtgtagcctttctcttacagtcttactgtg

SEQ ID NO: 18086 - DNA, 395 bp, Zea mays
  Clone ID: LIB84-023-Q1-E1-C5
acccacacgtcaacggacgcgtgggatcgaaaacagaggattttaagtactattcgaaattcgggagaattgcgtaaagggacccttgaacaactcgaaaaagctcgtattcgattacagaaagtcgaactggaagcagatgagtatcgaatgaatggatactctgaaatagaacgagaaaaagaaaatttgattaatgctacttctattagtttggaacaattagaacagtctaaaaacgaaaccctttattttgaaaaacaaagggcgatgaatcaggtccgacaacgggttttccaacaagctgtacaaggagctctaggaactctgaatagttgtttgaataacgagttacatttccgtaccattcgtgctaatattggcattctcggggc

SEQ ID NO: 18087 - DNA, 390 bp, Zea mays
  Clone ID: LIB84-023-Q1-E1-C6
acccacgcgtccgcggacgcgtgggctttggttgtgtatatgggtttgtcaacacttccatcacttgctccaaagttaatgaagcacggcctgccaccagatacccctgctgttgcagtagagcgcgggactacaccccaacaacgaacggtgttcgcctcgttgaaggatcttgtggatgaagtcaagtcagccgatctagtttctccaactctaataattattgggaaagtggtatccttgtcacccttctgggttgagtcatctgaacatgatgcactgaaagttcagagctcgtaagcaactgacgccagatgacaacagattttcttggtttttagtgactggccaatacttgagaaatgcacgatcccacgatctggaagcaca

SEQ ID NO: 18088 - DNA, 369 bp, Zea mays
  Clone ID: LIB84-023-Q1-E1-C7
aacctctggtcgaccttggatgcagatgtcgtggtgatcttgcaaaaccacatcgcacatgcattgatttttggtttcgtactacaggttcaaacaagtgtgagatatgccagcaggttgctgtcaatatcgcccctccagaaacgcaatcaagtacaagttattgggtttggagggttgattccacttatggaatgggacgaggaggacgagaaaggggatggttcagcccactttgggttgcatttgcaattctgattggtggtctcgtattggatgtgcggagacccgtttctcttggtgtttccgcacgtcctgtccgtagactaagtggggttctaatagttcacggattcggcagcgcccttc

SEQ ID NO: 18089 - DNA, 368 bp, Zea mays
  Clone ID: LIB84-023-Q1-E1-C8
acccgtcgtggtttacttctaccccgccgacgagacgcccggatgcacaaagcaggcgtgcgcgttcagggactcgtacgagaagttcaagaaggccggggcggaggtgatcggcatcagcggcgacgacgcggcgtcgcacaaggcgttcgcgcagaagtaccggctgccgttcacgctgctgagcgacgaggggaaccgcgtgcgcaaggagtggggcgtcccctcggacctgttcgggacgctgccggggcgccagacgtacgtgctggacaagcagggcgtcgtgcagtacgtctacaacaaccagttccagcccgagaagcacatcggccgagacgctcaaggatcctgcagaccctctgaat

SEQ ID NO: 18090 - DNA, 348 bp, Zea mays
  Clone ID: LIB84-023-Q1-E1-C9
ccgggccggcccacgcgtccacacaatgcattgtaggttataaaccaccaaccctatgatagcaaagcagatgtgttcagctttgccattgttctctgggagctgataacgtccaagatcccatatgataccatgacccctctccaagcggctgtaggtgtgagacaggggttgcgcccaggacttccgaacaagacgcacccaaagctgttggacttgatgcagagatgttgggaagcagatccatccgaccggcctgctttctcgggcattttagccgaactggaggatcttttggcacaagctcagggaacatcgggaaagacagtccaagatccatcaaactcg

SEQ ID NO: 18091 - DNA, 180 bp, Zea mays
  Clone ID: LIB84-023-Q1-E1-D1
gcgtccaggtcgatgctgttattgtgtgaactgttgagctctgttagcctgtgcacttttatctatttatttggtaccttcttgctatttcaccttctgcaatacaagaatgctgtaagagctatatgttaaccttttggcattgttaatttgattttaggaagtcgtatacttatcttc

SEQ ID NO: 18092 - DNA, 325 bp, Zea mays
  Clone ID: LIB84-023-Q1-E1-D10
aagacccggctggccgtgctgggcggctgggacccgctgaccttcgagcccgtggcggacgtgcacgtgctggacgcggcgacggggcggtggcggcgcggcgcgcccatgcggtcggcgcgctccttcttcgcgtgcgccgaggccggcggcaggatctacgtggcggggggccacgacaagcacaagaacgcgctcaagacggccgaggcctacgacgcggaggccgacgcctgggacccgctcccggacatgtcggaggagcgcgacgagtgcgacgggatggccaccgtggccggcgaccggttcctgggcgtcagcgggt

SEQ ID NO: 18093 - DNA, 355 bp, Zea mays
  Clone ID: LIB84-023-Q1-E1-D11
acccacgcgtccgcccacgcgtccgcggacgcgtgggttttagagatcacattacctcataaaattgctctggctttctataagattttatcgcaccaaaggtgccagtgatgtacaatgtgctaggctagtacactatccagatggccctttctcctagagaatcctaccattctagtcgtcgatctcctttacagcgtcctttgcgagcctcgttacataagcggcagcaatggctgtaaacaataatccaacgcccagtgtccatagctgttcgtttcctcccaaaccaatttccgactcatcttggattaaagctcgcccgaatgcaccggcactgacgtaagcccatgaa

SEQ ID NO: 18094 - DNA, 330 bp, Zea mays
  Clone ID: LIB84-023-Q1-E1-D12
ccgggccggcccacgcgtcaacccaagcgtccgctctcttgctcgcactcgcggagatcgaagagaagcgcaggaggccccagcactagcgccgccccgccgccgcatcagacatggcgctggccgctcgcctcgtctcgcgctcccgtcagctatattcggttcaagccactttggggaatggaggtgtcactcaagttcgctcctttgccaaggatgcagctccagctgaccgtcctcctgtcagtggggatgatctcctgaagggcatattctttgaggtaaagaagaagtttgagacagctcttggggttcttaacaaggaaaaga

SEQ ID NO: 18095 - DNA, 365 bp, Zea mays
  Clone ID: LIB84-023-Q1-E1-D3
gcgtccaatttacattatggtttgctggcggctacaggggagatcttaaaagctggcgaaggcagtgattacagcgactgtatgttggaggggcatcttgggaaatacaattacggtggtaatacatttgaagcatcaggctcaccttctggtgctagttattccaagtgcagggctcttgcagttagagctcttaaagttgatgagccagcatgcacacacatgaaatgcacatttggtggtgtgtggaatggtggtggtggagatggacaaaacaatctttttgtggcctcctttttcttcgatagggctgccgaggctggttttgtggacccaaaagcatcagtttctaaggttaaaccttc

SEQ ID NO: 18096 - DNA, 303 bp, Zea mays
  Clone ID: LIB84-023-Q1-E1-D4
ccaaacttcggctcgcctcagatgcttcgccagcgccagggccaccagtctactgcatcatcatcatcatcagcttgggctattaccacagctacgatccgtcgccacctgtctactgcatcatcctgttccagcccgcggctgctcatcaagcatagggcgacagcggcatcggcaccggcaccggcaccggcaccggcacagaatgagaaagaggtcgtcttcgtggctggcgccaccggaagagttgggtcccgggccgtaagggacctcatgaagcttggcttccttgtgctcgctgcc

SEQ ID NO: 18097 - DNA, 371 bp, Zea mays
  Clone ID: LIB84-023-Q1-E1-D5
acacgtccaaagtatgtcggaaagaagcacggtgacatggaattccatgatcttcgggctggcgaattccggtcactgccaagaagccatcggtctcttcaaccggatgctgtgcgacggagcaaggccggatcacctgacgttcaccgccgctctgacggtttgcagctacgccggcatggtggagctcgggaagggcctgtaccgcgccatgcacgaagaacacggcatcgagccgaggctggagcattgcgcatgcatggtgcatttgcttggccgacccggctggctcgccgagggcttatgacttcatcaaaggccatgccccctggagcctgactgccgtcctttggggggcgtttgcggggggc

SEQ ID NO: 18098 - DNA, 404 bp, Zea mays
  Clone ID: LIB84-023-Q1-E1-D6
aacccacgcgtccgaggccgccggcctcctccgctgcggcaagagctgccggcttcgctggatgaactacctccgcccggacctcaagcgcggcaacttcacggacgacgacgacgaggtcatcatcaagctccacgccctgctcggcaacaagtaagcactcagtctcagttcgccgcccgcccgccggtaccattatttccctcctcctcgactcaatcattttcccatcgtcggccggcccgtcgcgcgcaggtggtcgctcatcgcggggcagctgccggggcgcacggacaacgagatcaagaactactggaacacgcacatcaagcgcaagctgctgacccgcggcatcgacccgcaaacgcaccgccggctgagcgccggcggcggccctcaccgcc

SEQ ID NO: 18099 - DNA, 360 bp, Zea mays
  Clone ID: LIB84-023-Q1-E1-D7
agagcgagcgagagagcgctggtcatggcgtcactgtctgtcgccgccgtggcggccaccatagcgatgccaagcagcagcggtgggagagggcgccgtctcagggtcgcgtccatggccacccagaagggccagaagccgacgcccaagaccgtctccggcacgagaagatcgggcacgacgacggtgttcccggtgggcgagccgggcccgcggccggcgacgacgagcggcaaagcgccggttaagctgctgacgaacgtggagaagctgcggctgctgaccaacgcggagcgcgcgggcctcctgtccgcggcggagcgcgcggggctgtcgctgtccgcgatggagccgctgggc

SEQ ID NO: 18100 - DNA, 328 bp, Zea mays
  Clone ID: LIB84-023-Q1-E1-E1
ggcttcctcggggattggtgccggtcggtggactgctccgacgcgggctcgggtgtgtgctggtggtgggtttgcttcattgtcgtgcattgccgtagggaaggagccgttatcaacactgcgagccagaattaacatgaacggcagctatactcttacacgaacatcgacacacacctacagtgctaatgccaacggcggggaaacgctgttcaagtttctgagcagtgaccgtgatccgcgcggcagcagtaacactggccttgcgtacggtttggtcgtcccaaccttcaagccgatactaatgcatcgagctatgattagcaat

SEQ ID NO: 18101 - DNA, 351 bp, Zea mays
  Clone ID: LIB84-023-Q1-E1-E10
acggacgcgtgggcaaacatggcgaccacggcgtttctacccccggccaagctgccgctgcaggggcgtcggttcgctagccccaaaacggcgggacgtatcagtgtcagggtccctccggcgccagcgcaacaagagcagcaggtgaaagaggaggaggccgacgcggcgagcgtgccgccgccgcaggccgcggataaggacgcgaggaagggggacgcgcagtccctgccgcggcagcctttggcggagagcaagaacatgagccacgagtacagggggcagtggctgaacaacagcacgcgacacgtccgcatctaagctgcgtagatcgacccggttaccaacgcg

SEQ ID NO: 18102 - DNA, 351 bp, Zea mays
  Clone ID: LIB84-023-Q1-E1-E12
cggacgcgtgggcggccatgagtccatgacacactcctgctcgcggtgggggtgctcatcccggcgctgttcctgctcgtgccctcgcgccaggaggggtacatctcagacgaccacgacgtgttcgctgctgaaatcaaagttggtttcactttggaaaagccagtgtcattccttacttctcacatagacaaactagggaatgccatatttgaagagattggtgtacctaatagcaaggtatcatcgtttcaatgcacccattagcttttaaatactccacacatgttgtttttggtgttcttccttatccaaaagatgcttcaataagtttgccagctccaagtgtgt

SEQ ID NO: 18103 - DNA, 338 bp, Zea mays
  Clone ID: LIB84-023-Q1-E1-E2
tggaacagctgggtctaggggattaataggattggccaaactcgggaatacgtgctttatgaccagttcaattcaatgtttggctcacacagcaatccgtgatgaatacttccttggtgattatgcacaaattatatgccgggctactccattcggactgaatggtcgacttgccttgacgtttggagaactgttgaggagattaagcgataccgatcgggaaccagttccaccacagcagttcaaggaataacttgcacgttttgctccgcaacttggtggctttaatcaacacgattcatatgcacttcgtgcttttttaccggatggtctccaat

SEQ ID NO: 18104 - DNA, 325 bp, Zea mays
  Clone ID: LIB84-023-Q1-E1-E3
tccgcccacgcgtccgctggctaaagcaaaattccatgtcagctacaggggcagaacactgaccgatgctttacagcaggttctttctaataacttgcgctatttcttgaggcggccgacaacagaggacgccagcttctagccagatagatgatcatgaagcctcccaactttcttatgtggtggtattcacatgaattgaataccatcgtcaaagcatttgaaacacgcacaataatttgttaagatggggggaattgtacttgatgttatggcaccacaccaattcgaagtattttttgttccaaggcatgggaatctgttg

SEQ ID NO: 18105 - DNA, 338 bp, Zea mays
  Clone ID: LIB84-023-Q1-E1-E6
cccgggccgaatgatacatcgactcaccatatcacaggcagctcgagagagagagagagagaaagatgtcgtggttcgggcaccatcaccacacccagccggctcccccggcgtcaggccccaaccaggtgttcaagatcttctgccgcgccaacgagaactactgcctgaccgtccgcgacggcaccgtcgtgctggccccggtcaaccccaaggacgaccaccagcactggtacaaggacatgcgcttcagcacccgggtcaaggacgaggaaggcatgccggcgttcgcgctcgtcaagaaagccaccgggctcgcaatcaagcactcccgcggc

SEQ ID NO: 18106 - DNA, 401 bp, Zea mays
  Clone ID: LIB84-023-Q1-E1-E7
agcgactcagcgagcgagagcagcacacactgcacgcagctagctaggagcagcagcagcggcggcgatggcggcctccatgatctcctcgtcagctctggcggtggcgcctcagggcctgccgcccctcggccgccgcgcctcctccttcgccgtcgtctgctccaagaagaagatcaagaccgacaagccctacgggattgggggtggcctgaccgtcgacgtcgacgccaacgggagaaagggcaagggcaagggcgtgtaccagttcgtcgacaagtacggcgcgaacgtcgacggatacagcccaatctacaacgaggatcactggtctcccaccggcgacgtctacgtcggtggaatcactgggcttctgatctgggccggtcacctcgctggga

SEQ ID NO: 18107 - DNA, 278 bp, Zea mays
  Clone ID: LIB84-023-Q1-E1-E8
agcgaggagttcgtgattgcgtccaaggacgacgaggtcgtggacgcctgagcgagcatccacgcgccagcatgcaagcagcgtcttatctgggccggcgccatcacggggtttcttcttttaatctgggactttgttgctgttggacgaatgaattcccttcgatcggttagctttaatctgtctcgttagtgtgtcgtgttcgtgtagcaccatgccacacaccagccgtgtgctctgtcacgtgggggccactcctggggtctcctgctgctgtc

SEQ ID NO: 18108 - DNA, 403 bp, Zea mays
  Clone ID: LIB84-023-Q1-E1-F1
ggaaaggccatggaggtcacggaggccatcaccaaggccgccatgaacggccggcgcaaccttgtcacagtgccgctaactaagtactccacattcccgcacagagctgatgctgactatggagcagccaatgtgatgttgacgcctgcttgccctgaatctggtgttattgctggtggagctgtgagggttgtgttggagatggctggtgttgaaaatgctctgggcaagcagctgcgcagcaagaaccccctgaacaacgcccgagccactatcagggcgacgcagatgatgaagcagttcaaggatgtcgctgaggaggtggtattccaatggaggagctgtggaaatgataaaaacaattcgaaaccaagggccccccttttgtagcattaattctcct

SEQ ID NO: 18109 - DNA, 246 bp, Zea mays
  Clone ID: LIB84-023-Q1-E1-F10
ggcacgccggcgaaaccaacgtacagggagaggagcagacgaagctggacgtcctgtccaacgaggtgttcgtcaacgccctcgtcagcaacggtcgcacctgcgtccctgtgtccgatgaggacgacgaaacaacgttcgtggaccctaagctgcgtggaaggtactgcgtctgccttgatcccctctatcgctcctccaacatctactgtggcgtctccatcggaacgatctttgggatttaca

SEQ ID NO: 18110 - DNA, 362 bp, Zea mays
  Clone ID: LIB84-023-Q1-E1-F11
acgaaggtggggacctagactgtggtcaggtgcacgcgtattcaagcaggcgctcttgcttttcgtccacaacaagttctccatgtgccctgggcacgcgacacatgttcggggtggtgggcattaccgtcacctccctcacgtcccgtgccgccgcggccgaggtctgcttcctcgccttccgcaacgagcagtccgcggggtacgccgccgcctacgacttcctgacgggctccccgggcgccctcctcatcgtctccggcccaagatacatccacgggctcgccggcctctcccacgccaccgccaacgcctggtcgctccccatgagctccggattctgcgaccaggctgacgccggc

SEQ ID NO: 18111 - DNA, 222 bp, Zea mays
  Clone ID: LIB84-023-Q1-E1-F12
cgcgtcagcccgagcgtccgcacccggccgtggcggaggccgcagtggtggggcggcccgacgagtactggggcgagatgccgtgcgcattcgtgacgctcagggagggcgcggccggcagcgttcgcgccgatgaggtggtggggttctgccaagcgcgcctgccgcggtacatggcgccccggaccgtggtgttcctgggccaatctgccgaatacagcc

SEQ ID NO: 18112 - DNA, 403 bp, Zea mays
  Clone ID: LIB84-023-Q1-E1-F3
gtcatgtgttgttcggagcgggcagcagcacacagccccatcccaatcctagtcgatcttcttcccctcctcaaggaagaaaagaagctgaaccatggggaagagaaagtcagctgctaagccacctcctaagaagcggatggacaagcttgacactgtcttttcctgcccattctgcaaccacgggagtagtgttgagtgccgaattgacatgaagaatctgattggcgaagcatcttgtagaatctgtcaggaaaacttcagcacaactgttaatgcactcactgagcctattgatatatatagtgaatggattgatgagtgtgagcgtgtcaacactgttgaaggcgacgatgatgcgtgagcttgccccatgtgatgaaactgttaccctacaatcgta

SEQ ID NO: 18113 - DNA, 201 bp, Zea mays
  Clone ID: LIB84-023-Q1-E1-F4
gaaaccggcaagcccgggcggtccgtcgtccggatccgcggcgtcaccgacgacgccgccgccgccttcgtccgcctcctctactcccggcaggtgtcgcgaggatcagtatgacgaccttgaggagcacgccgtgcacgtgccggtgcctggcgcacgcgtatcaagtgccctggctgaaacgggcgttcgagggcgcca

SEQ ID NO: 18114 - DNA, 385 bp, Zea mays
  Clone ID: LIB84-023-Q1-E1-F5
ctccgacaagcgaagcagagcactggcatgagcatggaccgcatggcgcggcgttccgtgtccttgctcctcgctctggctctcctggccgccgcggcgtcggcggactcgtggctgtacgagaagttcacgacggagggcaacgtgcgcgcggactacaacgcgcaggggcagcaggtgacgtctctgatcctgacgcagcagtccggcggcgccttcagctcgcggcagaagtacctgtacggggagttcagcatccagatgaggctgatcccgggcaactccgcgggcaccgtgacctccttctacctgtcgtcgggcgacgggcccgggcacgacgagattgacatggggttcatgggcaaccccagccggcagcccgtgg

SEQ ID NO: 18115 - DNA, 353 bp, Zea mays
  Clone ID: LIB84-023-Q1-E1-F6
tcccgggccgactcatacgtcaacggacgcgtgggtgacgactgcaatcaggcctcaaattaatgccttcctggaagggtttaatgaactcattccacgggagctgatatctatcttcaacgacaaagagcttgaacttctgattagcggtcttccagatattgacttggacgatttgaaagcagatacagaatattctggctacagcatagcctctccagtcatccagtggttctgggaaatcgttcaggggttcaggaaggaagacaaagcccggttcctccagttcgtcactggcacttcaaaggtagcgttgggaggttttattgcacttcaagggatctctgggccac

SEQ ID NO: 18116 - DNA, 377 bp, Zea mays
  Clone ID: LIB84-023-Q1-E1-F7
acccacgcgtccggatctacgcggcgagcgccagttccttacactcaacgccctcaacgagttcgatcccaaggtcactggtgttgactggaggaagaagcttgagacccagcggggtgctgtgcttgccactgagctcaagaacaatgccaacaagcttgcacgctggactgcccaggcgctgcttgccggcgcagacatgatgaagttgggttatgtgtcacggctgcacccacgcgaccagtacaaccattccattctcagtgtgatcgggtacaagccaagggatttcgctgcacagatcaatctcaacaccgcaaatatgtgggggatcgtgaagtctattgtggatgtctgcatgaagcctggagaaggga

SEQ ID NO: 18117 - DNA, 284 bp, Zea mays
  Clone ID: LIB84-023-Q1-E1-G1
tcagagtctcatacacacttctaatctggccgggaaaactgacattggaacgtatcagtatcacggtcacgtcagttgactaatgtgtgactgtgagcgcgtgtgacagcttttacgtacacgggatcgctgaaaaggatacgtatatagctcgctatacggtcggcccccgttaagaaggaaaatatgctcggctcacgagcgctcttgcttcttgcttaagcctgtcttcgcttggtagccgtagcagtatagttttaccggacacacggcttatggatgtc

SEQ ID NO: 18118 - DNA, 258 bp, Zea mays
  Clone ID: LIB84-023-Q1-E1-G10
gggccgggccacgcgtccaaagcaaatctagccaccaaggcaccaaccaagagccatggcatccccgttctgcgccgctgccgccgcttgccgcctcgccgtccccgccccgtctcctcccgccgcacgggcgcctaagccccgacgcgggctgctggcggtgcgcgcggaagccggcggtgggataaaaccggccatccggaaggacggggggaaagtggttgacaacgttctcaacggcggagctcgccaagccgc

SEQ ID NO: 18119 - DNA, 395 bp, Zea mays
  Clone ID: LIB84-023-Q1-E1-G11
acggacgcgtgggcggacgcgtgggccagtccaaacaacaatgtccttgctgctaatgcatgccagtttaagaatgtcgttgctattgtagaccctccacgtgttggccttcaccctactgtgatcaaggcattgacgacgcatccacgtattccacgtctagtgtacatttcctgcaaccctgacagtctagtcgccaacgggatcgagctttgcacacgaacacccgagaaacaagagaagaacaaacgcgacccatggtggccgtctaagaacaccgcgggtcttgctcggcagaaggacaagtccaatcgcaactctgaagctttttaccccaagagggcaatggcggtcactttggtccctgacacaccgccacttccgaaaagggttag

SEQ ID NO: 18120 - DNA, 303 bp, Zea mays
  Clone ID: LIB84-023-Q1-E1-G12
agacaagtatcctgactttttcactccttttgacacagatggtttcatcggtagtcttctcgatgttcatcacggggtctatgactatcgctatgatgataccaagggagtttacattgcaattcataatgctcttctagaagttcgtaatcctgttgatgtccccttcaacgtcactgtgtgccaaggttctactattagttctgcgctaaaccgcatgctatacttcataaaaaccttcctgtctactgaacagtcttttgaccacatatttgtatccataaacctgtcagtcattcacga

SEQ ID NO: 18121 - DNA, 269 bp, Zea mays
  Clone ID: LIB84-023-Q1-E1-G2
cgtccacccacacgtccgcggcccaacactagtagcgtagctgagagcctgagacgatggccgactactaccacggcggcagggccatgtactccaacactgacgagtgctatgacgccggcaggcacggcggcagcgtgagggcgtactcgcgcaccgacgagtactacgacaacgtggacgaccgcatgaggaggcccgcgtacggcgcccacgactgcggctacggccgcacgcagaccgccgtgtacgccgacgagtactcccgc

SEQ ID NO: 18122 - DNA, 226 bp, Zea mays
  Clone ID: LIB84-023-Q1-E1-G3
ttggattgtcaaccgacaggggtccttttcaaaagagaaagcatatgtgacgggacttgaagctggtaatagggtagtaaacgattttgacattggggactttgccaaaataattgcacttgacggagatcagccccatatacagacattgcgaagtcctcaatgaagagccaatgaactgaagctcacaaattccattcccagaattctttccccaataattttg

SEQ ID NO: 18123 - DNA, 319 bp, Zea mays
  Clone ID: LIB84-023-Q1-E1-G7
ccgggccgactcatacgtccaatccgactccacaggatgcacaagataaaccagctctctcctctccaccgccccatccatcagcagtcgcgcattcctgaacagcggtcatggcctcagagctgccgtcatcggagttccattgcactcctctcagcacacggcacgacagcacgcatagcgactcctcgcactatcacctcatgaaagcatctcggcagccaacggtgagagcagccgtccgcgtcaagagctcgcagtggagggcattaagaacgacggcggtggccgcggtcgcatgacctgcgcgccgcccacc

SEQ ID NO: 18124 - DNA, 352 bp, Zea mays
  Clone ID: LIB84-023-Q1-E1-G8
cccgggccgacccaaacgtccacggacgcgtgggcgcgagtgagtgaacaccagccgtattgtcccgaccccgaccgatcctcgcctgctgcagccatggcgacctccgcggcgctctccaccgccgccaatcccacccagctctaccggtcccgcgctttgctgggcaagccggtgaaggggcttggcctgagcatgggccgcgagcgcgcccagcggagcattgtgtgccacgcggcgagcagcatctccgccgaccgcgtccccgacatggagaagcggaagctgatgaacctcctcctcctcggcgccatctccttgcccaccgtcggcatggtcgtcccctacgggg

SEQ ID NO: 18125 - DNA, 359 bp, Zea mays
  Clone ID: LIB84-023-Q1-E1-H1
gcgtcaacgagaatgaagataagagttctggtaaccctcagtctgggaaagctttgtatgacttcacagcaggcggtgatgatgagctgagtttaaactctggagaagaagtggagattgaatacgaggtcgatggttggtattatgtgaagaaaaggaggcctgcaagggatggaaagatggcaggtctggttcctgttctgtatgtgagttcatgataacagccgtgtgtatcgtttcccacacttgtgggagctgtttggagttcatgggcttaacaaaaaggcacactggaatgctcccgagagatcttcgcataaactcgtgcccgtcgtataggcacgtggccttgtggaagc

SEQ ID NO: 18126 - DNA, 357 bp, Zea mays
  Clone ID: LIB84-023-Q1-E1-H10
cgcgtccacgcaagtcgacactcgacaggctcggtttccgccctcctctcccaccgccgcgcaccgagaagatggggaagcggtggatcccgctggaggccaacccggacgtcctgaaccagttcatatgggggctgggagtccacgaggaggatgtgcagttctgcgacgtctacggccttgacgatgagctgctcgctatggtgccccagcccgttctcgccgtcctcttcctctacgcgctcacctcgctggacgaggagaaagaagaatcaagtgtttctgctgccacatcgacctcagcaggcaacgaattgagcaagaaagtatacgttacgaagcagactgttgggaatg

SEQ ID NO: 18127 - DNA, 333 bp, Zea mays
  Clone ID: LIB84-023-Q1-E1-H11
accggcgcctccctggccagccgcccggcgttctccaccagcttcacgcggggcagccgggtgtcggcgaggaaccccctgatgagcaggaacctggagaggaatggcaggatcacctgcatgacgtttccccgggactggctgcggagggacctgagcgtcatcggcttcgggctcatcggctggatggggccgtccagcgtcccggccatcaacggcaacagcctcacggggctcttcttctccagcatcggccaggagctggcccacttccccacgcccccgcccgtcacctcgcagttctggctgtggccagtgacctggcacctgggc

SEQ ID NO: 18128 - DNA, 388 bp, Zea mays
  Clone ID: LIB84-023-Q1-E1-H12
ggtcgggccaagcgtccgcccaagcgtccggagtcaggcacatggcccagacatgaccttggggcaagcatggatagccagtgagccagccttcataatcttcttggttttcgacgctctggctctcttcatctcgctcgcggtcgtcgtggtccagacgtctctgatcgtcgtcgaacagaaggccaagaagaagatggtcttcgtgataaacaagctgatgtggctcgcgtgcctctgcatctcggcggccttcatagcgctgacctacgtcgtcgtgggccgagacgacgagtggctggcctggtgtacgatggcgatcggcaccgtcatcatggtggccactctgggttcaatgtgctactgcattgtcgctcacaagatggaa

SEQ ID NO: 18129 - DNA, 357 bp, Zea mays
  Clone ID: LIB84-023-Q1-E1-H2
gcgtccacccacacgtccgggaagctgttgaagcctcaaaaggtttccagattattcccacgtgcttgttcaaccgaaatctggagttctggaagtgcaccgattgcaaccaactctactgggaggggactcagtaccacaatgcagtccaaaggttcttgtcagtgtgcaacattagtgactaagcagcacggccttggtactcatttgtaaaattgtaaggtactgagataccatcaccttcgaaagatcgaacataatctgatctttggcatccaatcgtgcacgatgaggcatgcaatccatttttagtggtttgctgttcgtcactgagatgctgttgtaaggaaaatagac

SEQ ID NO: 18130 - DNA, 280 bp, Zea mays
  Clone ID: LIB84-023-Q1-E1-H4
attcatcaatggcaagagtggacgtcgaaatggaccttcgcttataagaacgctgaacatgttgttgaatccaatgcagatatttgagctaagtgcttctcaggcacctgaagttggattacaactattccacaatgtgaaacacttcagaatccttgtttgtggtggggatggaactgtagcatgggttcttgatgctattgacaagcagaactacgagtctcctccccctggtcgccattcctcctctcgggaactggaaatgaccgtaccacgtgtt

SEQ ID NO: 18131 - DNA, 379 bp, Zea mays
  Clone ID: LIB84-023-Q1-E1-H5
ccgggccgacccacacgtccacccacgcttccgcggacacgtgggcagttccgtgggttaactcttcaggggagaatcctttagttcttccataccgattggtaatgggcctatggtagaccaactagaacgttatggtccatcccttgtaacccttacaaaaccggtgcttgcacttaggacagcttggttctgcaacaggtgtatattcgactcttgttacgtatttggtccgtgttccacaggttttattgggtttcattcgacacctacgtgatgacaatgggcctatggaagcatagcgcaaacagatgtctctgaaggccccacacggtgtctgttactgattattccatccgactgccttgccgtgttcaga

SEQ ID NO: 18132 - DNA, 264 bp, Zea mays
  Clone ID: LIB84-023-Q1-E1-H6
gctttgtggcggcggacagcggctgcagctagagccgggcagcgggcgacgcatcctgccatcgtcctcgtccggccagctgcacactgtgatccaatacaatggctagcgatggctgaagacctagatgatgatgatcatgatgatggacctgaggcatcgttgtaagcttgttgatgaacatctacatgacagtaatgtaccatgaatgctatgaatgtttcctagtggacttgccccgtaatgttttgtgatcttgtgaac

SEQ ID NO: 18133 - DNA, 410 bp, Zea mays
  Clone ID: LIB84-023-Q1-E1-H7
aggggagtcgtggataccaaatacaagcccagagggcgttcaccttttggttttagtggtgagaaccaagacggctttaccgagttgaacagaggaccaaggtctggtggtttcaagcaccaaaaacaattcggtcctactgtaactattgctgtgaagggccaagccctcccttcagtggggaaacagaacagtgctcttccagacaaaggccaatttaaccaggaagggtttcctttaacctacaaggatgcaaagttctttgttatcaaatcatatagtgaggatgatgtgcacaagagtataaaatacaatgtgtgggctagcactcctaatggaaataagaagctggatgctgggtaccgagaggctcacgagagatccaatgactgccccgtgttcattgtttt

SEQ ID NO: 18134 - DNA, 374 bp, Zea mays
  Clone ID: LIB84-023-Q1-E1-H9
acccaagcgtccgcaagaatgccagtgacaacagtgagatagccgatatagcgaagtcattaaagagaaaggcgaaggaatttagaaagaacgaggcccaggagagtgtcatagctgaatcatatatcgcaagtaatgatgaattgcggcaaaaaaagaaaaagaaatcaactaagtccaagtagccctaatcctcatgcataatgacactggcaattgagaaggattgcatgagccatccctataattatgtcattcatgctgtgatcgtattagatgatgaaacaaaattcgaaccttccgctggtctgttgttgcaacagttcatatgcaataggtttttaatgggtaaaaaaacgcaaaaaaaagggggg

SEQ ID NO: 18135 - DNA, 395 bp, Zea mays
  Clone ID: LIB84-024-Q1-E1-A10
acagcaatccacacaagcacttcgacgtcgcacgggcgctgcacacagacacaccaagcgtcggcaccaatggcttactaccaggaggtggactactgctcggaggaggtgaggtcggtggccccggccggcttcggccgccacggaggcggcgtccagcagcacgtcgtcaaggagaagttcgaggaggtcgacacggtctcacgcgccggcgccaaccaccaccaccaccaccatggtcaccacggcggccacggcttcgtggtgcgcgagaccagggtcgaggaggacatcaacacctgcaccggcgaggtccacgagcgcagggagagcttcctcgccagggctaactgagccggccggcgggcggcaatcacgcccgttccgtgcctgcc

SEQ ID NO: 18136 - DNA, 81 bp, Zea mays
  Clone ID: LIB84-024-Q1-E1-A11
acggacgcgtgggcggacgcgtgggcgctgcaatggtgaagaacagcggacaattatcctggaaactgacggttatgtgcc

SEQ ID NO: 18137 - DNA, 385 bp, Zea mays
  Clone ID: LIB84-024-Q1-E1-A12
acggacgcgtgggttttttttttttttttggagatgctgtgtaagttgattcatattggaccaagagactgcccaagacagtgaacacaacaattcttccttgccgattgaaccctggtacggtaagtaatttacatcatggtacaaactggaaccagtgcgcgctcacgtgcatccgaacacctagatatccgcagcggtggccggtgggcggtggcgcctccaccccctcacttgccgggcacaaagttggtggcataggcccatgcgttgttgttgacggggtcggcgaggtggtcggcgaggttctcgagcgggcccttgccggtgacgatggcctggacgaagaacccgaacatggagaacatggccaagcgggcgttcc

SEQ ID NO: 18138 - DNA, 359 bp, Zea mays
  Clone ID: LIB84-024-Q1-E1-A4
gccccaaccccaaccccaacccagcggtcccagtcccccctccgttctctctgcactctgcagctgccggtgccggccatggcgcgcgccccgagctcgtggacgccgtccctcgccatggtgctcctcgtcgtggccgccgcggccgtggtcgcgtcgtcggaggcggccaaggtgcccgccgccgtcggcaactggacgggggaggagctgctcggggccgccgcgatgcggggcggccggcgctcccggcgccgcgcgttcgagaacggcctcggccggacgccgcacatggggtggaatagctggaaccacttcggctgcgggatcaacgaaaacctcatcaagcagacagctga

SEQ ID NO: 18139 - DNA, 211 bp, Zea mays
  Clone ID: LIB84-024-Q1-E1-A5
cgtcaagagcgacccatgtccacacgacacgaaccaccatcaccaaccagcagccgcatcacgcacccagcgcacagcgatggcgtcgctcacgcatgatggcgtccttcgccgccgtggccgtggccgcgccctcgcgcgacggcaccttcgccgtggtcaggtccgcctcggtcgaccgctgcgaggagcacgccaggttggcacgtgc

SEQ ID NO: 18140 - DNA, 397 bp, Zea mays
  Clone ID: LIB84-024-Q1-E1-A6
aacacgtccctgtcgtctctcatggcgtccagcccaatcccgacgccgccaccgccgctcccgaagaccagcggcagagcgctctccgtcgcgccctgcggctccgcgtcgtcctcgtcgccgtccacttcctcgactcctcatccggtggcggcgtcggcgggcaggagggggctgctggcgctgggcgccgggttcctggcctcggccgcgctgctgtccccggcgggcgacgccggcgccacgcgcatcgagtactacgcgacggtcggggacaagatgtgcgacctgagcctcgtcaagtccggcctcgcgtactgcgacgtcgaggtcggcaccggcgtctagcccccgcgcggcgagctcatcaatgtgcactacaccgcgagatttcccg

SEQ ID NO: 18141 - DNA, 301 bp, Zea mays
  Clone ID: LIB84-024-Q1-E1-A7
acacgtccctgtcgtctctcatggcgtccagccgaatcccgacgccgctaccgcggctcccgaagaccagcggcagagcgctctccgtcgcgccctgcggctccgcgtcgtcctcgtcgccgtccacttcctcgactcctcatccggtggcggcgtcggcgggcatgagggggctgctggcgctgggcgccgggttcctggcctcggccgcgctgctgtccccggcgggcgacgccggcgccacgcgcatcgagtactacgcgacggtcggggacaacatgtgcgacctgagcctcgtcaa

SEQ ID NO: 18142 - DNA, 388 bp, Zea mays
  Clone ID: LIB84-024-Q1-E1-A8
aagggttggaatttgggaacagtgtttactggattagctttggcaatgagtacgctgaaaagaaattccctgcatccagaccgtttggtatcaagtacaagtttcacttagaggatgctgttgattgcccagaatgggttgttccattccatctcttcaaattattggcagaggagtatgatctcgagctggttctgatgaagaactttcatgaatttgtacacgagtacttgcaaaaaccagagttcgccgagctgatgcggaggctgggtgccctcggtgatggaaggcaggaccaaagtacactgtcacaagatgagtgggaggtttcctatctctatctcgcgtttgtcctgcggaagcgaggccaaccgcctacccaacgaag

SEQ ID NO: 18143 - DNA, 374 bp, Zea mays
  Clone ID: LIB84-024-Q1-E1-B10
acccacgcgtccgcggacgcgtgggtcctcacgagcgattgcggcggcggaagtaagaggcgatggggcactccaacgtgtggaactcgcaccccaagaactacgggcccggatcccgcgtctgccgggtctgtgcgaaccctcatggactgatcaggaagtacgggctgatgtgctgcaggcagtgcttccgcagcaacgccaaggacattggcttcatcaagtaccgctgaagtcagctgggcgggctatctgaatgccatctcttggacagtgtagtagaggcgatgccacaattttaattactgtcatttagatgttcccttcagaactctgctatttaagtccgccatgtttgtgatggagaacttaag

SEQ ID NO: 18144 - DNA, 342 bp, Zea mays
  Clone ID: LIB84-024-Q1-E1-B12
aacggacgcgtgggcggacgcgtgggagcggagaagcgcccaacccaacccgccgttcctcctccaaagcgccctcctgccccgcaaaatggagacctctttcctgcccaccacactccccaacacaaggcctctccccgcgctccgaacctacgccccagccgcctcgatccgttcccaacagcgccctcgtcgctccaccatacgcgcagccatcacccggggccggaaggatgagacggtgaccaccgtccgggagcaactggaggggtgctacctcctggcgggtaacaagtacgagggcctgaacgtgaagcagctgcagggaatccgcgaagcgct

SEQ ID NO: 18145 - DNA, 253 bp, Zea mays
  Clone ID: LIB84-024-Q1-E1-B3
ccctaaggtattggcacctcggtccagagaagactacttacagctgaaacaaagattacagtggttcactttaggcattggtggcgttggtgtaatctctgcttatatttcatacactcctgaaattgctgtcagctttggtgcagggttgattggatcattggtgtatctccgcatgcttggaaccagtatagattccctagcaggtggaactggacaaactgtccagagtgctgctgcacaacccaggttg

SEQ ID NO: 18146 - DNA, 321 bp, Zea mays
  Clone ID: LIB84-024-Q1-E1-B4
agccagaggagttgttgatcgaggtgagtgaggttgaaaagcacaccatcgtcatggacggcggatactacggcggtcgcgatcagcgctacagcggcgggtactacggcggcggtggcatcgcaacgccggggtacgctccggcggtcccgtacgggatgtcgcaggtgaacatcgagggcaacgggtgcgggcgggcgctgccgccgcagccgaccgtgaaggtgtactgccgcgccaaccccaactacgccatgagcgtccgcgacgggaacgtggtgctggccccggccagacccaccgactagtaccagcactgga

SEQ ID NO: 18147 - DNA, 357 bp, Zea mays
  Clone ID: LIB84-024-Q1-E1-B5
aaaagccgtcggttctactcccggaaggtgtcgccaaaggtctcctccagcacctacaacatagcgcaggtttcatatgagctgaatgtcttgggtactcggggccctaggcggatgaactgtgttatgcactccatccctacctcgtgccttgaggctggtggcagtgttcccagccagctggacagcatccttgctcgctccactgatgagtcatttggcagcatttccttctccaaatcatctgttgtggaacggtctatgcgtttcagcagctcaagattctccgacatctcaatgatcagcagccgcaggattggagacacggcatccggagacaatgatgagtgcaaggag

SEQ ID NO: 18148 - DNA, 356 bp, Zea mays
  Clone ID: LIB84-024-Q1-E1-B6
acccacgcgtccgttttttttttttggcacaggccatcgatagattgattcatccactgatgacgatagcatgcgtctgtgcttagtttacatcgaccgcttacagcaggcagccattgacattgattgatgagcacacatcgatcatgagcatacgccggctggtgcaactactacacgcctacgatctgaacaagtagagtacagagaagaccacactgttcactcgacggacggacgaacgaatggatggatctgacggtagtacacatgtacggcgttgctcagtcagttagttgccggggacgaagttcgtggcgtatgcccaggcgttgttggcgacggggtcggcgacc

SEQ ID NO: 18149 - DNA, 320 bp, Zea mays
  Clone ID: LIB84-024-Q1-E1-B7
aacccacgcgtccgcccacgcgtccgcaccgcaccaccagcgccaggccgccaagcgccagcaccaccgcgccgcgcccaagcaggcaagcaccactgacccaccaggccaccaccccaccgcttcgagccgagggagaaggccgcgcggggcggcgcgctcaggtctgagatgaggggcggatccagactggcctcggtcgccctgtttctcctcgctgcatccgggatctgtgcccagttcaccgcagtgctagctggtgatcctcacacattcaacgacgataagaaggctgaagctcagcctaggggccatactgg

SEQ ID NO: 18150 - DNA, 271 bp, Zea mays
  Clone ID: LIB84-024-Q1-E1-C10
agcccaggcgtccgcggactcgtgggcaggttcgtggggcgcctcgtcgcagttgaagcactccaacttcgaggcagttcatcactgccagggcgttctctcgctcgagtctggtcacacgcatgcccagccgagctcatgcgtccctctcccgcggtgcctggcttcgtcgagtctcgcctccagtcatggccacgccctgttacgcacacgagcccgccccagtcttcatcttgctatggatggtcagcggaagtctctccccttcctg

SEQ ID NO: 18151 - DNA, 376 bp, Zea mays
  Clone ID: LIB84-024-Q1-E1-C11
agctccacatcaacgccgtcgcacgccagatcatcgtcggctcgggtgaccagaggaaggacggcagcgtcttccgtggcatagacgaggtcacctacttccccagcaagtacaacatggagatgtcctccaaggcgtacaaagcctggaacttcacggaccttgctcttcccaacgatctcatcaagagaggtctggcgaaaggagatccaaagaagccagagacgctggagctggcgataaaggactacccgtacgcggtggacgggctcgacatgtgggcggcgatcaagaagtgggtggctgactactgcgccatctactacgccgacgacggcgccgtggcgaaggacagcgagctgcaagggttgtggag

SEQ ID NO: 18152 - DNA, 300 bp, Zea mays
  unsure (1)..(300): unsure at all n locations; Clone ID: LIB84-024-Q1-E1-C3
gggcattgcaggatatgttgcttggggacactccactccttgttggaccttttggagaggtgattgcaacaactgagcatgangaggcaactataatagcagaaattgactactcactgattgagcagaggaggcaatttcttcctctgcaacaccaacgccgtggcgatctctatcagctggttgatgtccagaggctgggttctcattagcacagggacgaagcangagagcagttgactctgcaggcttgctcgtactacttcgttcatgagatgcatgcccatgcccatcgagaga

SEQ ID NO: 18153 - DNA, 378 bp, Zea mays
  Clone ID: LIB84-024-Q1-E1-C5
acggacgcgtgggtgactgcttccttgaaaccaaaggttgccatcattcgtgaggaagggagcaatggggacagggaaatggctgctgcattccacgctgctggatttgaaccatgggatattacaatgtcagacctcttggctgggaagtcttctctcaaggagttccgtgggattgcatttgttggtggtttcagctatgcagatgtgctggattcagcgaaaggctgggctgcatcaatcaggtttaaccaacccctcattcagcaattccaggacttctaccataggccagacacgtttagccttggagtgtgcaatggttgtcagcttatggctcttcttggctgggtgccaggatcaggtgttggaggttct

SEQ ID NO: 18154 - DNA, 179 bp, Zea mays
  Clone ID: LIB84-024-Q1-E1-C7
ctgctctctccctcctcatctctgctctgctctggaccgttaactctccagctccccctcgctccgttcccttccgcccaaatcactgggaccaccaccgccttcttcaagatcggcgggcgggcaccggccggcgatgacatccaccgtcaccacaaccgtctggtccggggggcgcc

SEQ ID NO: 18155 - DNA, 390 bp, Zea mays
  Clone ID: LIB84-024-Q1-E1-C8
acgccatggcgggcttctgcactcctgctgccactgcagctgcccatgccgccctaacccctctgacgagctcaaggaagcacatcgccatgtgcctgtcccccaggccaagcggcggcggcggcatcggcggcggccagagggcgcggcttgcgagtacaggcgcagctcctcaggttcgcgcgctggcgccgacgaccgcggcagaagaagcagcgggtccctcccccgcccctctcaacgtggagtacctggccgctgagttcgccggccacggcgtcagcttcgagcccgtgggcgtcagctgcgccgtcaagatgtcgctgcgcaacggcaccgtggcgcacgtgctgctccccagcgggctcgtcacgtcttacaagcccgcca

SEQ ID NO: 18156 - DNA, 314 bp, Zea mays
  Clone ID: LIB84-024-Q1-E1-C9
ggtggctcaagttgttgaaacaaacaggcttggagcgtcaacttgaattgatagaaactcatcaacgagacgtagacaaggctctaccgagtatcgaggaggaagctgaacgcgtattccaggatgaccgaagtgttacttcatgaatatggagctgcttcagcatgagatactatgtatgaatatacgagacgttgtggagcatgcactgcgatcgatgatacaagaccttcaatccaccaggcagactatgagcgctactcatggtcgtgagctctagtccgcggcacgtacgccaccatttggtgttgccg

SEQ ID NO: 18157 - DNA, 214 bp, Zea mays
  Clone ID: LIB84-024-Q1-E1-D1
cccgggccgactcaaacgtcaactgctctctccctccgcatctctgctctgctctcggagcgttaccgctccagctccccctcgctccgttcccttacgctcagttcgctgggaacaccaccgccttcttcaagatcggcgggcgggcactcgccggcgatcacatcgatcgtcaccataaccctccgggtgcggggggctccccgtccgcccg

SEQ ID NO: 18158 - DNA, 160 bp, Zea mays
  Clone ID: LIB84-024-Q1-E1-D11
aaaagataccgctttgcggaatagtatgacaaattccgttgcttagccaactagaagtgttgagcgagacgaagatgatcatctgaatacatcttctccaggactaggaaggcttggtgagtgctcatagggagcaggttgaagcgactctggacatcct

SEQ ID NO: 18159 - DNA, 378 bp, Zea mays
  Clone ID: LIB84-024-Q1-E1-D12
aggcgagcaagaacaatagcagcatagggtcacctggaccaggacgtactagaaagatctttgttgggggtctggcttcaaatgttaccgaggtcgaattcagaaggtactttgagcaattcggtgtgataaccgatgtggtggtgatgtatgaccacaatacgcagaggcccaggggctttggtttcatcacatatgactcagaagacgcagtggataaggcactgcacaagaacttccatgagctcaatggtaaaatggttgaggtcaagagggctgtaccaaaggagcagtctcctggacctattgcacgttcacctgcacgggggcagaactatgctatgagcagggttcataacttcgaacatggttttacca

SEQ ID NO: 18160 - DNA, 363 bp, Zea mays
  Clone ID: LIB84-024-Q1-E1-D3
gtcatgtcgaagcgaggtacgggaggttcggctgggaacaagttccgcatgtcactgggtctaccggtggcggccacggtgaactgcgcggacaacacgggcgccaagaacctctacatcatctccgtcaagggcatcaagggccgcctcaaccgcctcccgtccgcctgtgtcggcgacatggtcatggccaccgtaaagaacggaaagcccgacctcaggaagaaagtgatgcccgccgtcatcgtccgccagcgcaagccgtggcgtcgcaaggacggtgtctacatgtacttcgaagataatgccggagtgattgtgaatcccaagggtgagatgaaaggttctgcaatcactggacct

SEQ ID NO: 18161 - DNA, 382 bp, Zea mays
  Clone ID: LIB84-024-Q1-E1-D5
gcattttcgccatatttgctggacctccggtgaattccaatgacttttatgtgccattcaagcccaaattgaagcttctctactacaaaacaatatgttgggtccagctacgttatttagtgcagggggcgtatatagctactatgtattccctttcttctataatgaataagattcaaaggttcacagtttgtcctaaaataaataatattttacacaaatatgaaagattgtctcctaatatggaagttaatcataggtgcttgcaagcaataactgtcaaatccaagagatatcctctacaaaaggaaaggagataaggatacagcttcttttgccaacgttcctaatatatctgaaaatttccaggaacttgtttatt

SEQ ID NO: 18162 - DNA, 333 bp, Zea mays
  Clone ID: LIB84-024-Q1-E1-D7
aacccacgcgtccgctccttcaagccggagcccgatgccaaccccgcgccgccaccggaggacacgagcgagatcgatgtgtacttcaaccccaagccgttcgaagtccgctgcgtgatcctgcttcgtccttggctcacgcactcagttttcctggtgccgatgcccatggccgcgccctccctgctccatttcgcatgtgcgcgcgctcggctccagtcctgccgcgagcgcggtgctcggtccccatcttcggcgcgaagcaccctgtggccgcgcggctactcctccaagtagagctccgtccatggccgccggtcgagctcctcccag

SEQ ID NO: 18163 - DNA, 380 bp, Zea mays
  Clone ID: LIB84-024-Q1-E1-D8
ctgtggtgatcatgtcgtctgagaatgtgcctgcccggatcagcaggtgcttgcaagacggcgcggaggagttcttcctgaagcccgtgaagctggccgacatgaagaagctcaagtcgcacctgctgaaacggaagcagcccaaggaggcgcaggcgcaggcgcaggcgcaggcgcagcagggacaggcggtggagctggagcctgagcagcagctggacccgcgcacgcagccggcgcacgacgcggaggaaaccgcggcagagccgccgccggccgcatccaacggaaccaccgatggcggcaacaagaggaaggcggcagccatggaagatgacgggatgctggccgtgatgaccgtggccgcgccggacagcagc

SEQ ID NO: 18164 - DNA, 253 bp, Zea mays
  Clone ID: LIB84-024-Q1-E1-E10
aggcaggccgcgccgccccagcaaatctcacgcacagaaacaccaaagccccaaaggcccaaactcaccacctcccaatggagaacggcgacgaaaccctcgcctcccccacggccgccgccgagacggacgcgctcaacggcggcgtcgcggaggaggagcaggtccccatcacccaccccgcaaagtcctacgtcacgctcggccgacgacaaccccgctcctaacggcggcgtcgtgaaggaggaggagg

SEQ ID NO: 18165 - DNA, 358 bp, Zea mays
  Clone ID: LIB84-024-Q1-E1-E11
acgccacagtgctggccatgcctggagccgttgcgcttgcgcccacgctcgcggcagcgagcagctccgccgccgcggcctccacgctggctccgaacccgacaagccgaggcgacccgctaactattaggttgtgccgcaatgctcctgctagcgcaactccacttgttccacttgtagccacccgtcgctacgtgcgtggctgccgcggcgcggctctagtcgccagtccccaccacgctccaaaccctcgcctccgattcgcgtctgcggcagaggggatggctgcggaagcgagcacggctggtgcggcgttcgcagccgaggcgaagcccttcgccgtcctcctcgtgtgcct

SEQ ID NO: 18166 - DNA, 357 bp, Zea mays
  Clone ID: LIB84-024-Q1-E1-E4
gtccaactcgtgcttcacgcactgtcagacccactcgagccactggtgacattcgcccacctccccgaggctcggtaatcagactgttgcagacgctgttggggactggtactttggtagaagacgggtagtgaagcaggtcgactgcgagtacccttgcaaccccacgtgtagcattcagtatgtgtgagctggcttctccttcgtgaccgccattgcaccgagctgaggttcatgggagtccttgtttcctccactcccgtacttgaggtgtccttggttacaaatcagttttattttaatccagagaacgatacctgaatgttaccgacaatacgtacaaggtgtgtgtaaacc

SEQ ID NO: 18167 - DNA, 424 bp, Zea mays
  Clone ID: LIB84-024-Q1-E1-E5
ggcatctatagcaaccggtccaacactttcacgctcaggcgctcagctctagcagtggctgcctccaccatggcgatctcctccacggcgatggccggtacccccatcaaggtgggctccttcggcgagggccgcatcaccatgcgcaagaccgtgggcaagcccaaggtggcggcgtccggcagcccctggtacggccccgaccgcgtcaagtacctcggccccttctccggcgagcccccgagctacctcaccggcgagttccccggcgactacggctgggacaccgccgggctgtccgccgaccccgagaccttcgccaagaaccgcgagctggaggtgatccactcccgctgggccatgctcggcgcgctcggctgcgttctccccgagctgcgctcccgcaaaggggtctaatttgggg

SEQ ID NO: 18168 - DNA, 297 bp, Zea mays
  Clone ID: LIB84-024-Q1-E1-E6
agcggacgcgtgggcgcgcgcacactgaattagctgtgccgctggctgcttcgtaaacctctgcttccttgtcctctgtctctgctgcagtctgctccagtcccttttttcttgtcccgcatccatggtgcagcttttgccggcgctggtggcgctcgcccttctcctcggcagaccggtggcggatgcggcgatggcgaaatacacgttcacagtaactcgctctcttcctctctctctctctctctgtgtgtgtgtgtctgtgtctctcgctcacttctatctctatgcagagtc

SEQ ID NO: 18169 - DNA, 380 bp, Zea mays
  Clone ID: LIB84-024-Q1-E1-E7
atgtttctggagataccaagcacgagtgcagcaatggcgcatcccatgcctccaaactcagcatcacagagcacaatcaccaccgttctgaagatccttccaaaacctcctgctgctccggagagcagaagcaataattgtgcttttggggccaaattcgacagtaggagggcacttctatgcggcttggtcgctgctgctgctgctgctggcaccatgctgggcgctgacatcgctggtgctgcttcgaagaggcggcctccaccgccagcgccggcagaggcgaagaaagacccgatctgtctgccgagtgcaggctaaagtgcttgctagcacgaagaggaaagacgccatgaaggaagctgtggccaagctgaggg

SEQ ID NO: 18170 - DNA, 399 bp, Zea mays
  Clone ID: LIB84-024-Q1-E1-E8
agcgtcacattataactgatgatcagttgtttagaccagttttggatccccaaggatgggaccatgatattgggttcgatgccatcaattttgaagcatctcaagagttgaaaaagaatgtctctgcggcaattacaggacagatgagaaaggacaaggaagacatgtatatccattcagaatgttcagtaagttacaatgctcagagaggctgctccttgatggggggtatggatatgcagacggcaagcaaagatttggtctgtactgttcatggggatgccaagttccacaatctgccttggaacagtagtggaggtggcatttctgttactaagtttggcaacaagtactttgctggggctaagttagaagactccgttaccattgggagacgag

SEQ ID NO: 18171 - DNA, 345 bp, Zea mays
  Clone ID: LIB84-024-Q1-E1-F10
acccaagcgtccgcacccggccgtggcggaggccgcagtggtggggcggcccgacgagtactggggcgagatgccgtgcgcattcgtgacgctcagggagggcgcggccggcagcgtgcgcgccgaggaggtggtggcgttctgccaggcgcgcctgccgcggtacatggcgccccggacggtggtgttcgtggccgagctgcccaagacagccacggggaaggtgcagaagttcgcgctccgggagcaaggcatggccatgggcagcatctccagctccgagcagcatgatggggcagggacgaggagcaagctctgatctgaactcgcatgcccacatggatg

SEQ ID NO: 18172 - DNA, 372 bp, Zea mays
  Clone ID: LIB84-024-Q1-E1-F11
agcagcctcatccccttgcccacttctacagcccctctgctgcagcaagaaggaaagaagctagcgcttatagcttgtcagccatggccaccgccgccgcgtctagcctcctcaagtcctccttcgcgggctcccggctcccggccgccacgcggaccacaccggcgtccctcgtggtggccaccggcccgcgcggcgccggcgcggggcccatctgcgcgtccatgtccatgtcctcctccaacccgccctacgacctgacgtccttccggttcagccccatcaaggagtccatcgtgtcccgcgagatgacccgtcgctacatgacgggcatgatcacctacgccgacaccgacgtcgtcatcgttggcg

SEQ ID NO: 18173 - DNA, 171 bp, Zea mays
  Clone ID: LIB84-024-Q1-E1-F12
agtgcaaaatggctggacgttgctgttctgaaattctgggccaattgttactcaggtcaataaaggactttgtttggacttgatgcattgtttcctttgtgtattggtgtgcggcatggaccaggaatgttatacatctgaatatatggctgttttcattttttaggcagt

SEQ ID NO: 18174 - DNA, 320 bp, Zea mays
  Clone ID: LIB84-024-Q1-E1-F3
cactttcgacgccaacaacaacgtgtccgtcatcatccagcccacctccaagaagacatcacgagtacgctccccgaggagttcctctcgcaggtcgactacttgctcggcaagcatgcctactgcggcaagaccgactccgatggcgggttcgagaccgacgccgtggccaccgccaacgtgctggagagctccacccccgtggtggacggcaagcagtactacagcatcaccgtgctgaccaggacggcggacggcgaccatggcggcaagcaccagctcatcaccgccatcgtctccgaccgcaagctctacatctg

SEQ ID NO: 18175 - DNA, 389 bp, Zea mays
  Clone ID: LIB84-024-Q1-E1-F4
acccacgcgtccgcgttcaccttccggtgatcaaataccatggaaattttgtgaacagttccaagacaatgtatttccaagtctctcaggagctcgtatagtgcgaattgctgtccatcctagcgccttgaggcttgggtatggctcagctgccattggccttctatctcggtactatgaagggcaaatgagaagattatttgatgacgatgaggaggaaacggaagagcctgatgtgaagattactgaagctgcagagaaggcttcactgctagaagagaccataaaacctagggcaaatcttccaccactccttgttcatcttcatgaacgtcgtcctgagaagctccattatcttggtgtatcttttggacctgaccaagagcttt

SEQ ID NO: 18176 - DNA, 377 bp, Zea mays
  Clone ID: LIB84-024-Q1-E1-F5
acgcgccgccaccatcaccttcgcagccctagccgccgcctccattgctgctatacccgcaaccatgggtcccgtgctgaagcgcccgaccccgggcacggtgcagtgtttcgggcgcaagaagacggccgtggccgtggcctacacgaagccaggccgggggatgatcaaggtgaacggcgtcccgatcgagctgctccgtcccgagatgctgcggctcaaggccatggagcccgtgctgctggcggggcggtccaggttcaaggacatcgacatgcggatccgcgtgcgcggcggcgggaagacgtcgcagatctacgccatccgccaggccgtcgccaagggtctcgtggcatactaccagaagtacgtcgacg

SEQ ID NO: 18177 - DNA, 418 bp, Zea mays
  Clone ID: LIB84-024-Q1-E1-F6
ccgggccgacccaagcgtcagagctactacaaatgtacaaacccgggctgttcagtgcgcaagcatgtggaaagagcatcgcacgatctgaaatcagtcatcacaacgtatgagggaaagcacaaccatgaagttccagcagccagaaatagtgggcaaggcagttccagcgctccatctgcatcacaagctggtggttctcaccgtaggcaagaacctgcacaggccagctttgctcacttcggtacggcttctttcagctcgttcggtctcccaccgagtggtcagttgggaccaacaactggcaatttcggcttcgggatggttcccccaggcatgacgattccagtgccctctctaggatcgcttgcccctgtaaagatggttggaaattcatcagctatgcacgggtagcaag

SEQ ID NO: 18178 - DNA, 116 bp, Zea mays
  Clone ID: LIB84-024-Q1-E1-F7
aactctacctttccattactgttatctcttcataatctctcctctcatgtatcctgtttctctaccttctagaacaatttggctatcagatatcaaattagatcgtcttcctcgct

SEQ ID NO: 18179 - DNA, 392 bp, Zea mays
  Clone ID: LIB84-024-Q1-E1-F8
ctcaaattctagccaaagttcactgcttgagtgtgcagtccttatgtactgctggtataaccccctccctagcccaggtttgcccccttctccccatggactggatgcgctcagtgacccctccccctgcctatttattcagtgtgttccacggctgagttcagaaaagcttttctcccttgttctcgagctgtagtcccagtccactacaaaggtgttggagtcctggtattcttgctggtgtgcatcctctctttcagccaccaagtttgttttactctagagctgaatgccaacctcttgcctgtggtgaccaaacccaaccgtttttcacctccccgtggacaaggtttcccacaagtattcttggtcgtgtactacttgttccatgc

SEQ ID NO: 18180 - DNA, 318 bp, Zea mays
  Clone ID: LIB84-024-Q1-E1-F9
acggacgcgtgggcggacgcgtgggcggcgtcacccttcccgccaagtccctcgcacccttctcggctccggcacagttgaacggcacccactgaagctgctactgctcttgaaaagaagggcacagtgcagatctgctagagatgatgagagaagcagcaatcaagtgtagctgttgctcgtagacctgctgtgctgttgctgtttgcaaagctgccgtcttgactccgcctggtaagtagtgtactgatagccaggtatagaggttaggttaggtgttagcgacgcaaagcctttccctgtttttcttcgccctct

SEQ ID NO: 18181 - DNA, 323 bp, Zea mays
  Clone ID: LIB84-024-Q1-E1-G10
agcccacgcgtccgcccacgcgtccggtggtgtcggaggaagaggtcgtggctgccgccgaagcagccaacgcgcacgggttcatcgccgcgctgcccgacggctacgacaccgtcgtgggcgagagagggacccggctgtcgggcgggcagaagcagcgcgtcgccatcgcacgggccgtcgttaatgaccccaggctgctgctgctggacgaggccacgagcgcgctggacgtggagtcgggccgcgtggttcaggaggccctagaccgggtgatggttgggaggaccaccgtggtggtggcgcatcgcctgtccacgatc

SEQ ID NO: 18182 - DNA, 379 bp, Zea mays
  Clone ID: LIB84-024-Q1-E1-G11
agcctttgaaaccaagcatggacttgcaccttgcatggttgctcctactaagatcatagctggcttggggttgtcactggggattgatatccttgaagcacctggagcaactggagattaccgtactctcttaacttctaaagctaaagctatagccaaggcattatctgcccctatgggtacaccacctcgtgtttttgtgcctggagaggatgaatacaaagctggaaaagaaaatggatatgactttgggttcctgcacataaaggccattgatgatgctggtcatgataaggctgtcaagttaaaggtacggggtctagaagctgttgatcgagctattggtcagcttgcaaggcttctttgggaagctgaaaat

SEQ ID NO: 18183 - DNA, 394 bp, Zea mays
  Clone ID: LIB84-024-Q1-E1-G12
aggccgtcacggccaccaccgggtcggccaaggccacgatcttcgatgagtacctcgagaagagcaaggccaacaaggagctgaacgacaagaagaggctggccaccagtggagccaactttgcgcgcgcctacaccgtggagttcggcagctgccagttcccctacaacttcactgggtgccaggacctcgccaagcagaagaaagtccccttcatcagcgacgacctcgagattgagtgcgaggggaaggagaagttcaagtgcggctcaaacgttttctgggaaatggtgaagcaagctagcagcagcgtctgatgggaatggaggagatcatcacctgtcttgtcgaccctagatatgtccaaactgcagggaaattaaatcttcaagtg

SEQ ID NO: 18184 - DNA, 310 bp, Zea mays
  Clone ID: LIB84-024-Q1-E1-G2
cgtcagagaacagtccggcggcgtcacgtacgtggagggcatgaacgcctacagcggcctcaaggggctcaacaaggtgaacatgctcggggtgcgcaagaccgccgactactccttcgccaaggtcgtggcgtcgctcagccccgcgggcaggaagcggcgcggcggcgcgttcggcgcccagatgaacgccgccgccgagatcttcaggatcgccgccaccatgaacggcctcgtgctcgtcggcgtcgccgtcgggttcgtgctgctccgggtggaggccgccgtcgaggagtccgagtacggtgcc

SEQ ID NO: 18185 - DNA, 138 bp, Zea mays
  Clone ID: LIB84-024-Q1-E1-G4
ctttgtatgaaaaacccaagaatttccagaaaggaattatccaaatggctgctgttgtgaaagctaaacctagaactgaaccacggcctgacaaaactgaaccaaataaggaagcagttgggccatcacaattgactg

SEQ ID NO: 18186 - DNA, 403 bp, Zea mays
  Clone ID: LIB84-024-Q1-E1-G8
aggccagagccagagccagccagccagacacacaacctcggtcggcgcggcggctcaacccaatggctccttcctccctccgcccgccgcgccaccacccgtctcccctcgtcgtcctcgccatcgccgtcctcctcgtcttgcgcaccgccgatgggctgccggaggcgggaggaggaggaggaggcggcggtctgtaccgggagattctcagggacgagaccgtgcagaggctcaaggagctgggcaagatatctgatggggatggctaccttgaaaggacgtttctgagtccggcctctatcagagccactggtgtcatcgtcagctggatgaaagacgctgggcttacgacgtgggtcgatcagatggggaatattcatgggcgatatgagccgggaaa

SEQ ID NO: 18187 - DNA, 174 bp, Zea mays
  Clone ID: LIB84-024-Q1-E1-G9
aactcccgcatacaacctggacacgtgggactgagagatgtgcacactggtgaaaaagacatcatgatgcagagtatcgtcctggcagacaccctcaagtacctgtacgtacatttcccccgtccatcagtcatagccgtcgacgagtgggttttcaacgttgacgctcagcca

SEQ ID NO: 18188 - DNA, 357 bp, Zea mays
  Clone ID: LIB84-024-Q1-E1-H10
agctttgatcacacacaggaagttgagatcagaaaaatgcaggctgccgctactgccgccgggttctcggccgtgctgcccgccaagggcaggccggcggcgaggagcagggtggtggcccgtgtccccgccacaaggaggagcgtccgtgtagctgccgtcgtcgcgaccgaggccgcgcagatcgactacagctcaagcgtctcggtgttcccgatggaggcctgcgacctgcttggtggcgacgcgtgcaacgggcccatgttcccggaggccaagcccgcctcggcggcggcggcggcgagcaggagtgtggtcggggtggacagggactacctgtcctacgacgagccaaag

SEQ ID NO: 18189 - DNA, 368 bp, Zea mays
  Clone ID: LIB84-024-Q1-E1-H11
cttccaccgtctccctccgcttccccgtgcggcggtgccgggtcgcgccgtgccatggcgcccgccttctcggtctcgtgcgcgcccggatcctcgcgcccgctggccgccagccccggccccagcgtcgtcgtcgtcgcctcctcccaacttcccgcgtcgtcgcggagcagcgaacgcaggagagcaccaggcctcgcgctcgccgcggccccgggtgtcggcggtagggatggcggtggcaggtggagagcaggcatctcgtccttccccttcctgccgccgttcttcacagggaacaagggggagaaggacgctgagaaggcgatgaggctcaaggaggagctcctcgacgccattgcaccgct

SEQ ID NO: 18190 - DNA, 370 bp, Zea mays
  Clone ID: LIB84-024-Q1-E1-H12
aggaaacctctcaaaccctagccgcctcctgcaagtttcagagctcaggaatctgcgccatggcgagtgagacggagaccttcgcatttcaggctgagatcaaccagctgctctcactcatcatcaacaccttctactccaacaaggagatcttcctccgcgagcttatctccaactcttccgatgcgctggacaagatcaggttcgagagtctcactgacaagagcaagctcgatgcgcagcctgagcttttcatccaccttgtcccagacaaggccacgaacacgctctccatcatcgacagcggcatcggcatgaccaagtccgaccttgtcaacaacctcgggtacatcgccaggtccgggaccaa

SEQ ID NO: 18191 - DNA, 91 bp, Zea mays
  Clone ID: LIB84-024-Q1-E1-H2
agaccacgcgtccgcggacgcgtgggcttcgactgtacatgagaacaaagactaaggagagctccattcccgtacaaggaacacacaagcg

SEQ ID NO: 18192 - DNA, 351 bp, Zea mays
  Clone ID: LIB84-024-Q1-E1-H8
agcccacgcgtccgcccacgcgtccgcttaggcccaaaatatgctgataaactgggaccaggctttcaggagtactgcaagacatacccagaaaattattgcttagcccagcttatctattggtatagccagaattcagaacctgaatctagattaacaagagctagaaaaggttgcatgtcgttgccagatgtctcatccttctatgtgaagtctgcaaagccatcacaagagcgagcttatggaaacagaactgtgagattcatgttatcgcgcatggaaaaacaggcacaaagaccatggccaaaggataggatatgggtgttcacgagtgatccgagattctttggt

SEQ ID NO: 18193 - DNA, 368 bp, Zea mays
  Clone ID: LIB84-024-Q1-E1-H9
gccatgcctaggtatcaagtgggcttgacaaaggatgattcaagtagtagacactctgagtggcggcagcctagcacagatgatgtgcgcaagagcaagctcgggccaagatacttcacggcgtttggcgtggatctgtcccctgataatatggcagttgccattgtctattttgtgcaaggggttctgggtcttgcacggcttgctgtgagcttttacttaaaagatgatctccatctagatccagctgagaccgcagtggtatctggtttctcatccttgccgtggttgatcaagcccctctatggctttatcactgattccattccactctttggatatcggaggatgtcgtaactttttcggtc

SEQ ID NO: 18194 - DNA, 391 bp, Zea mays
  Clone ID: LIB84-025-Q1-E1-A10
acagacgcgtgagcggacgcgtgggccgccccactggtggcgcaaagcaaagcaggatggtgctggttgcgctgtatcagattgtgagagagagcttccagctctactctgatatctgcgaggtgctggcggtgctgctggacaggttctttgacatggagtatgcggagtgcgtgaaggcttttgaggcatatgctagtgctgcaaagcagattgatgagctctctgcattctattcatggtgtaaagatactggagttgcaaggtcatctgagtacccagaagtgcaacgtgtcactgataaattgctggggacgctagaagagttcatgacggaccgggcaaagaggcctaagagcccaccacgggagcctgaacctgagcctgttaa

SEQ ID NO: 18195 - DNA, 158 bp, Zea mays
  Clone ID: LIB84-025-Q1-E1-A11
acccacgcgcccacccacgcgtcagcgtaaataagaagttgtctgagatgaaatcagataatgaaaacaaggacaaagatgcccaactgcgacgtcaggaactgaaggaagtcatagcaaagcaacaagagctgggttttgacccacctgagctaccg

SEQ ID NO: 18196 - DNA, 384 bp, Zea mays
  Clone ID: LIB84-025-Q1-E1-A12
ttcccggtaccgacccacgcgcccaatccaatcctgaacttcttctattacctgctggttgagatagtgccttcagctctggtgctcttcattctacggaaactgcctccaaagcgtgggatcacacaataccacccgatccattagagagcaggccttgggaacaggcaaaggttttctggtggatagtgttacacaacgtggtaaatacagaacggagagtgaaaagtaccactcgagctttgcccagctttttatacggaagtctttagaatcccaggttgaaattgtgtgtaaaaatgcgatctctttcactaagatttagaaaatgtaacttataatactttgttattctcagtgcgtatcatctgttcacattgcaaa

SEQ ID NO: 18197 - DNA, 329 bp, Zea mays
  Clone ID: LIB84-025-Q1-E1-A2
agaactgtaagacgtatagtgatggcagcagccgcaaagcatctgaccccggtagctctggagcttggtgggaaatcccctgttatcctggattcaaatgttgatctccatgttgctgcaaagaggattgttgttggcaaatggggatgcaacaacggccaagcatgcattgctccagattacatcataacgacaaaatcatttgcaccggagctggtggcctctttcaaaagagttttggaaaggttctatggggaggatcctctggaatcagcagacttgtctcgtattgtgaattcgaagcagttcaaaagatttgacaaatttga

SEQ ID NO: 18198 - DNA, 340 bp, Zea mays
  Clone ID: LIB84-025-Q1-E1-A4
gtccaggagtgttgaccgtaggaactttgtacacatagaatacttgttgaggagagggaagaagcagcttgagcagctcaagaatcctgatattactggactcgctacccttgtactaaagaaatgaggtccattcattgccagaacaaagtatcatcatgataccggtgtttctaatgtgaagatttggaacctgccactgatggtgtccaaataaaataaatatgaccacagattacagatttgatatccagcgactttctaatcagcctattagaatctgaagataaatcttgtagcacctgtccggtgagccatagtaatattattttactcttgc

SEQ ID NO: 18199 - DNA, 404 bp, Zea mays
  Clone ID: LIB84-025-Q1-E1-A6
aacccacgcgtccgactgaacgagcactcgcctgcgctcttctctctctcgtggcgacgactgggtgaccgccggcgccccaggcctgaggcctccatcttcgggcccttcactggctacgagcaccaccagaggattatggattggctggggcagaagcgcgcggagatgctgatgcaggtgctgctggtggcgtctgctgtggcggcgttcctggtgggctacgtgcgcgcggacttccagctcatgctgctcgtctacgccggcggcgtcgtgctcacagcgctcgtcaccgtccccaactggcccttcttcaaccgtaacccgctcaagtggctcgacgcttgccgaggcccaccgcccaacgggccccaaagttcaccccggtgtcggacccagggggg

SEQ ID NO: 18200 - DNA, 377 bp, Zea mays
  Clone ID: LIB84-025-Q1-E1-A8
gctagtagcttgcaggccgaggaaaggttcaagcttaggcagtgtatctgatgagaaagccagacttgaggaacttaagaagcaacgggagctagctgctgctaccaaagaagaggagaaaaagaagagggaggaagcgaaggccgcggcagcagcccgggtacaagcaaagcttgatgccaagaaggggaaggggaagggaaagggaaaatagatcgtgacgttgctgctgactattgttgtaaccaagaaataattgtgggagcgtcctcaaattgctccgtcacttgctgttgctggctactgtgcttgatgttgtagcggactgatgtatcgataagagctaagtataaataatgtctggtatctacattacc

SEQ ID NO: 18201 - DNA, 175 bp, Zea mays
  Clone ID: LIB84-025-Q1-E1-A9
gatggatcaacccgtcgtgcgtggtctcgttttgtgatgagtgggagagagaggatgacaagatcgatcctttgttaatggagatctcgttaattaggagagctaccgctgggacttggtggtttgtaatatatgatccaaccagtgatgaatcaatgcattcacttgtgtacac

SEQ ID NO: 18202 - DNA, 205 bp, Zea mays
  Clone ID: LIB84-025-Q1-E1-B11
ctcaaggcagccagcagcggagggaggaaccctagcggaacaggtgacggcggcgcgctaccggtgacgggggatacggcggcatcgtcccctcctccatccccggcgcggcggcgccagcagccggcctgcaggctgtttgaagagctcgccatttaatctcaatggaagccaagtttttccgtttcctgaagctcgttggggt

SEQ ID NO: 18203 - DNA, 436 bp, Zea mays
  Clone ID: LIB84-025-Q1-E1-B12
cccacggacgcgtgagcggacgcgtggggtggcattgccatagaaggcccagatttcagaaccaagagtgaagaagagcttactcaactgataccaaagatacaggtgagttcattagttgtagtactcatctttgcacgctttttttgtatcctggtaggtcattcatcagtgatcactgtgatttgctatggatgtggcaggtgatggcaagatcttcgccactggataagcatacccttgtcaagcatcttcgaactaaactctacgaagttgtggctgtgactggtgacgggacaaacgatgcacctgctcttcatgaagctgataatgggcttgcaatgggcattgctggaaccgaggttggcaaagagaatgctgacgtcatcattcttgatgacaacttctccaatattgtcactgttgcaaaatgggg

SEQ ID NO: 18204 - DNA, 341 bp, Zea mays
  Clone ID: LIB84-025-Q1-E1-B6
acccacgcgtccgcccacgcgtccgcccacgcgtccgaagtgcgagcgacccacgtccacacgacacgaaccaccaccaccaaccagcagccgcaccacgcacccagcgcaaagcgatggcgtcgctcaccatgatggcgtccttcgccgccgtggcggtggccgcgccctcgcgccgcggcaccttcgccgtggtcaggtccgccaaggtcgaccgctgccaggagcccgccacgctagcagcaaccgacgccaggcccgccgccgacggacgccgcgccgtcatgctcgcggctgctgcggcgggcgtggcagccaacggcggcgcccgggccgccatg

SEQ ID NO: 18205 - DNA, 357 bp, Zea mays
  Clone ID: LIB84-025-Q1-E1-B8
aagtccccctccgtccgctctcacccaccgcttctatatcgccacctctctcgttgtagaagaagacactgaggatctggctttctggaatcacatttcttgagaactatctgttggagaactaaactaggctcttgttcatattatggatcagcaagctaagattgatgctgattttcttgaaccaactgtactcttagatgagacacattaccaggaggggtacaaaaatggctataatgatggtttggcatctggaaaggaagaggggaggcaggttggtttaaagatgggtttccaggtcggtgaagaactgggtttctttcagggctgtctggatgtgtgggcgtctgcaat

SEQ ID NO: 18206 - DNA, 315 bp, Zea mays
  Clone ID: LIB84-025-Q1-E1-B9
ttccggaccgacccacgcgctcacaagtgcgagtgctgcgggttcacggaggagtgcacgccggcgtacatcgcggcggtgcgcgcccagtacctgggccgctgggtctgcggcctctgcgccgaggcggtgggcgacgagatccggcgcgaggggaccatcaccacggccgacgcgctcgaccgccacgtcgcgttcgcgcgcgcgccgcgctcccggagggcgcccgcggaggacgacctcgtggcggccgtggcgcggctgctccgccgctgcctcgactcgccgcccgcgtcgcctgcgccgccgccacag

SEQ ID NO: 18207 - DNA, 412 bp, Zea mays
  Clone ID: LIB84-025-Q1-E1-C10
attcacggaccgacccacggccccagttaaggggcacatcacgacatcacgtagctacttcaaaaggaggaggatatgtaagcttcataggagatgatcgcatgcaaaccagtgtatgtatatggagtatatcgatctaatgctttagggctcgttcgttggcggttccagctaaattttgtattaacattgattagctagaacagtttctagcctcagcccaagctaaatttgaagtgaagactttaggtaaaacagaaatgcaactataacacaactgggttaattttacattcgctcggatgctgagatgtccaattttcaatagtgatgtaagtaaagagcaccgataatctttttccataaaaattctctagaaatgtgtcaaaaaaaaaaaaaaaaggcggccgct

SEQ ID NO: 18208 - DNA, 370 bp, Zea mays
  Clone ID: LIB84-025-Q1-E1-C11
acgaggtgatccgtgttgttccaagaccaacagttcttgccgacttgagttttgaggaaataaaaggtgtgtttgagcaattgccagaggcagttagcttgcttgccttggcacgaacagcacatggtacaagggccaggtattcaagattgtacagaaccttagccagcaaagtgacggccttgaaagagactgttgcagagatggagagaggtggtgttttcaaagatgtacgataaatgctgtgttattgtacagttacttatgatattgatgttgtatatggatgccatttgtccgcatcccttgtaactgtacttgcttttactatgtggaaacctatgttgtaacactattctttggcaagaga

SEQ ID NO: 18209 - DNA, 319 bp, Zea mays
  Clone ID: LIB84-025-Q1-E1-C2
cccacgcatccgccaactccgacgacgccgtggtgcactccgccgacgaccgcctcatccgcggcgcgcccatggacaggcactacagcttctggaagggcgccgacgtcctcgtcctcaactcctacctctggtgggtcgccggggacaaaatccagatcctgaggggcgccgacaacgacccgagcaatgacatcgtggagatgaagtccgaggacgcctaccggctggtgctgcaccaggtggtccggtggctggagcgcaacgtggaccccggcaagtcgcgggtgttcttcctcaacgcttcgccgacgcacac

SEQ ID NO: 18210 - DNA, 360 bp, Zea mays
  Clone ID: LIB84-025-Q1-E1-C7
cttctacgcgctgatcaagtccaacgagacgttcctcatcaccatcaacgcggccggctgcgtgatcgagaccgtctacgtggtcatgtacttcgtctacgcgaccaagaagggcaggatgttcaccgccaaaatcatgctcctcctcaacgtcggcgccttcgggtccatcctcctcctcacccttctcctcttcaagggtgacaagcgcgtcgtcatgcttggctggatctgcgtcggcttctccgtcagcgtcttcgtcgcgccgctcagcatcatgaggcgggtgatccagaccaagagcgtggagtacatgcccttctccctctccctctcgctcagcctcagcgccgtcgtctg

SEQ ID NO: 18211 - DNA, 328 bp, Zea mays
  Clone ID: LIB84-025-Q1-E1-C8
agcggacgcgtggggttccaaggagctgaacctggcccaccctacacaactggtgaacatctagttgagaatgcaggaaaaatggttctactagataaattgctgcccaagctaaaggagcgtgattccagagtcctaattttttcacagatgaccaggcttttggatatcttggaagattatcttacgtatagaggttatcagtattgtcgaattgacggaaatacaggtggagaagatcgtgatgcatccattgaagccttcaataagccaggaagtgaaaagtttgttttcttactttcaactatggcaggtggccttggtatca

SEQ ID NO: 18212 - DNA, 271 bp, Zea mays
  Clone ID: LIB84-025-Q1-E1-C9
ctcaactcaaagaatattcatccatacaaatatgctggagagaacgttgatgtgcaaggtcttaatatgttcaaaggtaaagtcagtgtagcagatatgatagttatctcgccttctgaagtaacatcatcaaaatatgatggaactctgaaatactgggaaagttccattacccttgtcgacattcttaaaaatgagatccgtgatgggcagtttagcttcaggggcaaacgggttctaaagcttggatgtggatatcgcctctctggga

SEQ ID NO: 18213 - DNA, 398 bp, Zea mays
  Clone ID: LIB84-025-Q1-E1-D10
agcgcggcgcgtcgggttcgaggtcgtcatcggggacccgcccttcaacgtcgacgtcggggagttcgccaaggaggtgaacgccgtggacgtgctggtgggcgtgcacggcgccgggctcaccaactcgctgttcctccccacgggcgccgtcttcatccagatcaacccgtacggcaagatggagcacatcggggaggtggacttcggcatccccgccgtggacatggggctcaagtacatcgcctactccgccggcgtcgaggagaccaccctggtggacacgctggggcgcgaccacccggccgtcaaggacccggagtccatccaccggagtgggtgggggaaagtggccgagtactacctcggcaagcacgacgtccggctccacctccaac

SEQ ID NO: 18214 - DNA, 350 bp, Zea mays
  Clone ID: LIB84-025-Q1-E1-D5
agtcccaggttttatcctagcaacaggatttggtgcatcactgtatttcctggcaaagaaaaatatgaacttaggtaaggctgcattgatcactgtcgggggacttgcagctggtgcaactgtcggatctgcagtggaaaatttcctgcaggttgatatcgtgccctttctaggcatccactcccccgccgtcgttgtcagtgaatttattctgttctcccagttgttggtatcactgtttgttacgtacgatctgaaatcaagctgtcatcctgatcatggcatgtaagtaactgaaatggttcgtgttcaaacttcacagggtcacggaaatgcctattttccgctca

SEQ ID NO: 18215 - DNA, 353 bp, Zea mays
  Clone ID: LIB84-025-Q1-E1-E10
gacccacgcgctcagggacgccttacagcgcctcaagtcccgctggggctgcctccagaagcgcaccgaggtgaagctgcaggacctccccgtcgtgctcggcgcctgctgcgtcctccacaacatctccgagcgcgccggagacgccgtcgaccccgacatcgcgttccagctcttcgacgacgacatggtggccgagaagcccgtgcgctccacggctgccgtctacgcgcgcgagaacatcgcccacagcctcgtccaccggggaacagtagcagcgccgccgccggccccaggttcgccttcaagtgaactctgacagctggagcaaggagaaacacctcgctttctcg

SEQ ID NO: 18216 - DNA, 315 bp, Zea mays
  Clone ID: LIB84-025-Q1-E1-E8
aaagagtttgtgcaaactcggtcggagtggtgaggcgagggcattagtggacgacatgatgaagaagggcacaaagccaaattgggtgacctacaaccatctgatttatggattctgtaaggacggggatttggacgaagcaaagcgtctgtacaaggagatgggaagaaaggggcttgttggggatagcgatttctattttatgcttatttattacctttgtaacggtgatgatttggacactgcccttggactatacaatgaaatagcagctaagaattgggtgccatgcctctcaaccatgaaaatgcctgt

SEQ ID NO: 18217 - DNA, 385 bp, Zea mays
  Clone ID: LIB84-025-Q1-E1-F10
ccaacccacgcgtcagcttggaatgggtggaggctccatgtaccgcatgcaacagggagcaggtgggctgcctgcaggcgcatttggtgaaggaggaaactaccctcttccaggttctggtttccgaggccacgaccctcaaggtggaatgtctcctcctgggccaggtggcagggctcctcctatgtatcccaacgtgccaccttatttctaaagtgtgtgacaactcttgggagcatatcctttgaaatggttgtgctgaattcacaagtgttgtctgcttacatggatgccttgcatattctggctacttctgatctggaatggaatgtggaatgagtttgcactcgcagtttcccttattaagggatacatgaagctaggt

SEQ ID NO: 18218 - DNA, 427 bp, Zea mays
  Clone ID: LIB84-025-Q1-E1-F12
aaccgcgtgtacaacgagggcatgaagaaccactcggtgatcatcaccaagaagctgctggacttctacacgggcttcgagggcgtgtcgacgctggtggacgtgggcggcggcgtgggcgccacgctgcacgccatcacgtctcgccacccgcacatctccggggtcaacttcgacctgccgcacgtcatctccgaggcgccgccgttccccggcgtgcgccacgtgggcggggacatgttcgcgtccgtgcccgccggcgacgccatcctcatgaagtggatcctccacgactggagcgacgcgcactgcgccacgctgctcaagaactgctacgacgcgctgccggaaaatggcaaggtcatcgtcgtcgagtgcgtgctgccggtcaacaacgagggcaaccccaaagggcaaggggtccttc

SEQ ID NO: 18219 - DNA, 281 bp, Zea mays
  Clone ID: LIB84-025-Q1-E1-F8
gcgagcgcaacatgcaaacacgtccaatctggtaccgaggttacaggcgttgcagttatagccccttgatctcatctccttgtccctggtagggttggttcagttctatcacaagcttcgctctgtttttttttatattcaccttcattgagaagattgtagagtaccataggctgagggaatagctcgcttgttgaatcccagtgttttagtccggtttagccttagccatgaatgtaaaaatgttgtaaaattgtcaccctgccttacaagtccttcca

SEQ ID NO: 18220 - DNA, 405 bp, Zea mays
  Clone ID: LIB84-025-Q1-E1-F9
acggacgcgtgggctaccaggaggccctcggcgggctgcacaacctcttcggcgggccgagcgtggtgcgcgtgtcccagtgcgacgggtcccactgcttcgccgtgacgcgcgccgccgcgggcccgtcctgcgccgacgtgctccgcgcgatgcagcacgagcccgaggtgatgtgcgaggtgctgaagcagaggaccgacggcgccacggccgccgccctcgcccgggccttcggcgcaatgccgtacctggtgttcgaccccgaggccgccgtgatgtccggcggcgagagcagcgactcggagcggtcgggcgccggcgccgccgaggaggaagacgatgaggagtgggagttcatgcgcgggctcaccgtccgatgacgtgcccggccgcccggccccg

SEQ ID NO: 18221 - DNA, 396 bp, Zea mays
  Clone ID: LIB84-025-Q1-E1-G12
agcatgttgtcatgggtcagttagacgttgcgtctgagaaacttcagagagaagggtcccggaggagcgcaacataaagcttttgatcgcacaaatgcatgttgtcatgggtcagttagacgttgcgtctgagaaactacaaagtcttataaatgaggatcctcgggattttcggtctcatctttgccagggcattgtgtatgcacttttagacagaaaagaagacgcagatatgcagtttgatgtatacagaagccttgtgccggatgaattcccagataagagttttatcagtgatgttatactggcggctaggacggagtcacatgatcggctacaaaaggaatttgactctgagtttcaagcgaagaaatgatacattaagttttgtataga

SEQ ID NO: 18222 - DNA, 379 bp, Zea mays
  Clone ID: LIB84-025-Q1-E1-G4
cgtcaactggcgcacacctcctacttctctttcctgccccatctgcctgttgatcgctgtccgctccagctcgcggatgctgcgcgcctaggtgatgctcgtcctccccttcgcacggttggccgggtggccctgtcgccgttcctcaggccgtctcagcttcgctcgatgctgagttcctctccagcgcgcggattcctccctgcgtcgcgcgtgagttcggcgtcgaactccccaacgcgcaactcactgagctcgtccctgcgcgccatgatcaccagtcgtccgcgcttgctcggattctcgtccctgcatgcaagctgtctgtcgggcgaccttcatccccagttgtgctcgcgccaactcctgggttacgcac

SEQ ID NO: 18223 - DNA, 354 bp, Zea mays
  Clone ID: LIB84-025-Q1-E1-G7
acgcccctcctccctccgtctcgtctcccaggtcatggcaaaagctggagcaccgggaaaaataacaagtgggagataaacaggaagagctaggtgaatacttagagaaaaggtcccccacaccccccacgcaggtgaatactacaagtaggagtgtacaaggaagacagccaatctgcccgtgactgcgagtgaattgctacggtgtggtggttagttgaaaacttgaggtcacgatgatgggaggcgggctgatgatggatcagagcgtggtgttccctggcgtccacaacttcgtggatctcctgcagcagaacggcgaccagaacctggggttcgcctcactcatgccgc

SEQ ID NO: 18224 - DNA, 232 bp, Zea mays
  Clone ID: LIB84-025-Q1-E1-G8
aggagagaaccggcacagccgccgcagtccgcagatgtcgatcgtggtggcatcggaggtcgcgaccgctctcgcgagccgcggcgcggtcgtcgccctcgagtccaccatcatctgccacggtatgccgtacccgaagaatctccagatggccatggaggtggaggccatcatcagggataacggggctatccctgcaaccagagccgtcgtggacggagtccctcacgtc

SEQ ID NO: 18225 - DNA, 429 bp, Zea mays
  Clone ID: LIB84-025-Q1-E1-G9
agttcgagcaccaggatgcttccttcagtacagtagtccccatagagaaggggacctcacaaacatggtccgggccgttgtttgatccagcagctctcgggcagtcgaggcggaagaagcaaactaccctagatgctaaggctgctgcttactcaaagcagctccaaaaggaaaagggagggatacgagcccgataacaaaatgtcgttttcctggtgagcatgtggagggaccgtgggaaaggttcatcgcctacggatgaattttcttgttttgttcctctggtggttggaaacaggcaacaatgcgctgctgtagggtgaaatcttccggattgtgtacatgtcatgtggtaacgtttccaagtactgtttacatgcttctgaacaagctgccgtcacccggacgggaccttaggggttttagaac

SEQ ID NO: 18226 - DNA, 415 bp, Zea mays
  Clone ID: LIB84-025-Q1-E1-H12
ttcccggaccgactcacgcgcccactcaagtcggaactacggatccccgcttacgttccgagtcgcctctcagccgccgcaggcccttgccgcggccccttacggctacggcagcgacctgctcaggcccatcgacacacagacgatcatcacaccctccgccgtcgtatcctcaatcggcctcgctcgcgtcttcggcctcaacggccacacggtgccgtgcgacaggtgcgctgggaatgggggcacgaaatgtgtgttctgcaatgatggcacggtaactgttgaaactccactcgttgagtgccgtgtatgcacacgaccacggctaatactttgcaagaagtgtgctggttctggatactccaagcggttgtaccggaatcccggtttggctggcattcagtgcagtttt

SEQ ID NO: 18227 - DNA, 261 bp, Zea mays
  Clone ID: LIB84-025-Q1-E1-H2
acccgcccgtccaaccagtccagatagatctttcccccgtcctccctcgccttcgcctcgtcggcatgagatttccagtaccaacgccggtcgacacctaccctccttccctctcgcgctatggcccatactgttgtgctcaaggttggcatgtcctgtgatggctgtgttggagctgtcaaacgggtcctgggcaagattgaaggcgtcgagtcctacgacgtagacatcatggcaaacaatgtcaccgtgcatggcaat

SEQ ID NO: 18228 - DNA, 327 bp, Zea mays
  Clone ID: LIB84-025-Q1-E1-H3
cgtccacgggtgaatgggcggacgcgtgggcggacgcgtgggtggagttcaattacgaggagacaccttgaaagatgctacagaagcattcccattcacgcgatgggaagcagcttctgttatgcccatgacagaaattgagattgagaagcagcctatccaagtaactgaagttgcagttgtgggcaaatcggtcatcgaagaggagctgcccaagggtcatggtgagacctcaaatgttttgcaagaggcctttgatgatggcatagacgattggttccaggaggctgatcgtgctggccacccaactatccacagaggtgacga

SEQ ID NO: 18229 - DNA, 315 bp, Zea mays
  Clone ID: LIB84-025-Q1-E1-H4
tattccgagtctgccggcgccccaagtgcccgagctgccagtgccgccggtgcccgagctgccgatgcctcaagtgccgccggtgcctcaactgccgggcgtgccgctgccgcccgccacggtgccgtagcccgtatgtgcgccttgcgttgatgctgtaccgttccccgtgccgtcctctcttgtaccaccaccgccgtcgcgtcgtcaccgaccaccgacgagcctacagacgtgcaaatgctgcctggtacacacgtgctgccgccgacgccctgtcgtgtacctgtgtttacgtacgacttttttgttgtt

SEQ ID NO: 18230 - DNA, 311 bp, Zea mays
  Clone ID: LIB84-025-Q1-E1-H5
acccacgcgtccgcccacgcgtccggcaggataccatcgccgacgtggtgctgtcgccggaggagatggagatgtacgtcgacttgcaccccttcaccaatacgtcgccgtacacggtggtcgagaccatgtctctggccaaggcgctcgtgctcttccgggaggtcggcctgcgccacctcctcgtcgtgcccaaggcctgcgataggtcgccggtggtcggcatcttgacgaggcatgacttcatgccagagcacattctggagctgcaccctgtccttctgaggagcacgtggcacatgctccggtgg

SEQ ID NO: 18231 - DNA, 200 bp, Zea mays
  Clone ID: LIB84-025-Q1-E1-H6
aatcatggagaggttccagctgaagagagagttgagaacctgaacaagttccgcaatgaagagggggattgtccaacattagtatgcactgatctggcagctagaggcctgcacctgcatgttgaccatgtcatcatgtttgacttcccatcgaattctattgattaccttcacagaaccgcgagaactgcacgcatggg

SEQ ID NO: 18232 - DNA, 355 bp, Zea mays
  Clone ID: LIB84-025-Q1-E1-H7
taaacctttcctagccagcaagtttgttgtactccaaagctgagcgccaacctccttccaatggtgataacgctcatgtttctctctgtctcctcgtggtcaagcatactcgaacatgggctcaacgtcgcacaacgccgccgggaaccacctaatcatcgatcgctcgattcacgacttctccgatcaaaatttataccacctagaagaagtggtgtttgaacgaggagtctactccagtggctgctgatcaagtggcggagccatctaactgggtattgggtagaaaggtcttgagcctcttcaatgcaataaacgcaagccccgggtgcattttcccccttccgtgtaattt

SEQ ID NO: 18233 - DNA, 367 bp, Zea mays
  Clone ID: LIB84-025-Q1-E1-H9
agccgtctcgtctcgtccggtcgtccctctccgtctccggtctccagtctcgctgcttccacaagtccacaaccgtaccagcaccaccgcgccatggcgtcctccgccgatcccgatgccgccacgccaccatccgcgccgcagccggagcccgcacggaaggcagtccgcgtggtggtgaaggggagcgtcacgggggtggggttccgcgactggacggcgtccacggccgagtcgctcggtctcgccggctgggtccgcaaccgccgtgacggcagtgtggaggccctcctctccggagaccccgcgaagatcgaagacatgataacccgccgcctccccgtcgggccccccagccgccaccgtc

SEQ ID NO: 18234 - DNA, 253 bp, Zea mays
  Clone ID: LIB84-026-Q1-E1-A1
ggggtgggcggacgcgtgggcgtggtgtgggagaagttccagggaaacgagagcttttctgtgcatgcggcaataattcgagatggtcccatgttgggtcttgtgagggccctgctatcctctcgtgtccggtgtcgtatatcagcagcaatggcccgtgtgactggatacgtccaggtgtgccagcgccgtggtgctctataagtgctgttagtcccttgtgggcgtgtgtgttccatcggataatccagtt

SEQ ID NO: 18235 - DNA, 410 bp, Zea mays
  Clone ID: LIB84-026-Q1-E1-A10
agaagctagcgttcaacagaggaagaagcgagagagctgacaagaatcgactgccatcaatggctctggcgccggcgcctctccagtgcttcctcacgagcagcagaccggccgtatgcacggcgacgccgcccaataagcgcgcgaggaggccgtcgaggatctcgtgcagggcgtccggcgatgacaaggacaaggtcccgtcgtcgggagggagcgatcttggggtcaagcagctcgggaagctggccatggtcgcgctggccgccggcgtgctggtgctcggccccgtcgacggtgccgtggcggccaagtccggcggcagggtctgcgggcacgcgttccggtccgcgccccggtcgtccggccctcggatcaacaactccaggaccaacatctacatcaacccg

SEQ ID NO: 18236 - DNA, 312 bp, Zea mays
  Clone ID: LIB84-026-Q1-E1-A11
aacggacgcgtgggtttttttttttttgtataatttacaccatatttcactgataatgtctacaaggaccaaagcatgcatgcaaatacgtacactactggtacaatctctgagcccatgctcccttcttcacaaatactggtacatctcctgcagtagatatacgaatacgtacgtctacggtacatgcatacaagtacgtatacgccttcgctcacttgccggggacgaagttcgtaccgtacgctcacgcgttgttgttgacagggtcaccgatgtcgtcggcgaggttctcaacgggacccttgccgg

SEQ ID NO: 18237 - DNA, 144 bp, Zea mays
  Clone ID: LIB84-026-Q1-E1-A2
gcacgctcgcgcagcagcagcaggcggtgcgcgaagtgctgcagtccatgctgccccccggcgcgccggctcaattccggccgctgtgtggcactgacgcagtgggcctgccagttcaacgcggcgctgaccgtgcccatcttc

SEQ ID NO: 18238 - DNA, 351 bp, Zea mays
  Clone ID: LIB84-026-Q1-E1-A4
acggacgcgtgggcggacgcgtgggcggacgcgtgggttttttggtgtttttttttttgttttttttttagatggaataaaagaatgcatggtaacaaaaacacaatttaggaacttgtccgtgatgcaagcgtacagcagcctggtgtcccctagaccctcaagtacaaggaacaaaagcacaactaaacgacaccgtacagctgcggtaatctagagaatgacctgacctacaacagacaaaaatcagctatatatgccccagaataggggagacaatcgccagacgagggataaagaacatgtaagaacagatatcttagccatcagggctatttggaccatgcgact

SEQ ID NO: 18239 - DNA, 232 bp, Zea mays
  Clone ID: LIB84-026-Q1-E1-A5
acgcgtgggcgtgcgcaaggaggggtgcccaggggatctagagcttttctgtgcatgcggcaataattcgagatggtccgagtggggtcttgtgacggccctgctatcctctcgtgtcgcgtgtcctatatcagcagcaatggcccgtgtgactggatacgtcggtgctgtgcgagcgccgtggtgctctatagttgctgttagtccccttgtggcgttgtgtgttcgatcg

SEQ ID NO: 18240 - DNA, 327 bp, Zea mays
  Clone ID: LIB84-026-Q1-E1-A6
cgtcgagccgccggcttcatcagctccggctcgagggaccgtcgacaccaagacactgtacgccggcgacatcatggtgttcccccagggcctgcgccactggcagtacagcgccggcaccggcgctgccgtggggctcgtcgccttcagcagccccaaccccggcctgcagatcaccgactgtgcgctctttgccaacaacctcccgtccgccgtcgtggagaaggtcggcttcttggacgacgcgcaggtgaagaagctcaggagtgggcgcggcggcggcggttagcgtgtttttcgagacaatacagtgcaggctgggtatgc

SEQ ID NO: 18241 - DNA, 345 bp, Zea mays
  Clone ID: LIB84-026-Q1-E1-A7
tagggtgagtcctttgtctttttgtgacctacaccagttttctttagtagtacgattcaagagaggttccatgtactaattatgttacaaaataatacgatatataacgcgtagatatatatccaatatatacagatgaagcctggaacggtggcactgctcattttgttgaacatgatgtgcatagttgcggactttgatcatggaagctttcctggaacgagggcgcggggaaacgaggttgctggcagagtcctatggaagaaatgaaggaaccaagggcatacatcgtggaagaaagctgatggacgccggtagggattcaaaccgtgggttttccaacag

SEQ ID NO: 18242 - DNA, 336 bp, Zea mays
  Clone ID: LIB84-026-Q1-E1-A8
cacgcgtccgcccacgcgtccggtgcgtgcgcgtggacttcaatgagcccgtgtggttcaaggccggcgcgcagatcttctcggagggcgggggggactacgtgggcaaccccaacctggtgcacgcgcagagcatcctggccgtgctcggcttccaggtcatcctcatgggcggcgtcgagggcttccgcatcaacggccgcgacggcgtcggcgaggggaagaacctctaccccggcggccagtacttcgacgcgcggggcctcgcggacgaccgcgtgaccttcgccgagctcaaggtcaacgagattaagaacggccgcctcgccatgttct

SEQ ID NO: 18243 - DNA, 405 bp, Zea mays
  Clone ID: LIB84-026-Q1-E1-A9
acggacgcgtgggcggacgcgtgggctaatctcaggtttggggggaaaaggcctcgcgggtcgcaaaccgctctctgttgatttgggatttgggaggcgctcgagttttcaggtaaaccatagtttagtgacccatggctcgtactaagcaaactgctcgcaagtccactggagggaaggctcctaggaagcaacttgccaccaaggctgcccgtaagtctgcacccacaactgggggagtaaagaagcctcatcgttaccgccctggaactgttgctcttcgtgaaatccgcaagtatcagaagagcactgacctgctcataaggaagcttccgttccaaaggcttgtcagggagattgcccaggatttcaagactgatcttcgtttccagagccatgcggtgc

SEQ ID NO: 18244 - DNA, 247 bp, Zea mays
  Clone ID: LIB84-026-Q1-E1-B1
tgacagtatgagaggccaccactgcgatgttgactgggtttggaactattttgcatgtgagcgctctgatagattaaccacacaacgtgggactgtcagcaataaaacaccactctattttcagcatcaaggtcattcaaagacaattgttgggattcaaaaggaaatgggtcaccgtggatctcacgaacaatacacccttttgattttagatcctgcgcatagaactgcagatctacaaaggtcc

SEQ ID NO: 18245 - DNA, 377 bp, Zea mays
  Clone ID: LIB84-026-Q1-E1-B11
aggctagaagcattggtacaggtctatggcgctgtagctggttccaccaagaatatcagaggctctgctccatgctgtgaagtcgttcgctatggctggatttgtaggagcagtgctggtgctggtgcttgagttcatgtaccagaggatctccgtcagggcacccagcctgctgtccagctccatcttctgggtctgcagaacagagttctgcgcttgcactgccacaaggttttggctggttatactcagtgccatgctgagctgcttgttctggtccttcagctgatttacctgtttcagtccgcaataatacaccgctcagatatatgaattcaatcctagcttgtttctgctatgtttagacaattttagtg

SEQ ID NO: 18246 - DNA, 91 bp, Zea mays
  Clone ID: LIB84-026-Q1-E1-B12
accactattgcacaaacatggttcatcttagtggtggtttttgtttcctgctggttaattgttgatatccattaatttgtttttcttctat

SEQ ID NO: 18247 - DNA, 326 bp, Zea mays
  Clone ID: LIB84-026-Q1-E1-B2
atctctgatttacgggatggacggagcgaagccagtggcggccgggaagcaggacctggaagaggcgctgctccgtatcgtgcagcagcggcaccaccagtccctctgccaacgacaacaaacgggtacgagcgtgcaaagaaggacgccttgaagagcgcggtgcgggtcgccgatctcctcgtggacacggtcgacggcggggtgcgggagctcttcgtcaacgagaagcgcatcgagctcgaggcccgcgcgctgctcggtagcatcgcgcggtgcaggaggcagactgatgagtggctggcggccaccagcgagatcaactc

SEQ ID NO: 18248 - DNA, 207 bp, Zea mays
  Clone ID: LIB84-026-Q1-E1-B3
ttgctttgtcaaggctgccgtttcgtggacttcagaagcagccaattgtcaatgctgtcattgatggtgatgacatcgtagtgcaggacggggtagacagcagtgttgctgttggcacttccatgggccttgtggttcctgttatccgagatgctgataccatgaactttggtgacattgagaaagggataaacaaccgtgcaaaga

SEQ ID NO: 18249 - DNA, 373 bp, Zea mays
  Clone ID: LIB84-026-Q1-E1-B4
gggtgggagcatacagctacatcaacccgcggttgctgacggcgatgaaggttctgggccggggtggcatcgaggacatcaagtacgtcggcagggccccgtcggctgctaccgcgacgggcttctactcggtgcacgtgcaggagcagacggagctggtgcagaaggcgctgcagcgcgacgccctcaactaccctttctgaaagaaacgaggcccctgtagattcgtggcattggggaccttttgaatttgatatagtaccagtatagagagaacatgccgtagagtttatctgtgcagccatttggtgaaataattgtttcgactctgcagtaccgcatgagacagaccggttgtagtttgggaaaactc

SEQ ID NO: 18250 - DNA, 374 bp, Zea mays
  Clone ID: LIB84-026-Q1-E1-B5
tgccggtcaatgggtcgcgggtccgagcaggcgggaaggcacgcgtccgcccacgcgtccggctgcgacccgctcggcctcgccgacgaccccgaggccttcgctgagctcaaggtgaaggagctcaagaacgggcgcctcgccatgttctccatgttcggattctgcgtccaggccatcgtcaccgggaagggcccgctcgagaacctcgctgaccacattgccgaccccgtcaacaacaacgcttgggcctacgccaccaacttcgtccccggcaagtgagggaggcgccgccggtgacctttaggtgtccggatgcaggtgagcgcacgctggttttcggtttgtaccatgatgtaaactaatgttcaatc

SEQ ID NO: 18251 - DNA, 348 bp, Zea mays
  Clone ID: LIB84-026-Q1-E1-B6
aagtcctagccaggcttcccttgccctagtgttgcgccgccgccgccgatccatccggcctctccccgcccgccggccgcgatgtagaacggcatcgggctgcagaccgcgcgggggtcgggcaccaacgggtacgcgcagagcaacaagttcttcgtcaagccccgctccacatccggccggggtccgggcgggccccataggccgctgcgctccgacgccgccggcgcggatggcggcgggatgcgcaagcccaacaaggggatgctcgagcacgaccgcaagcggcaagtcgagctcaagctgctcgtgctcaggaacgcgctcgaggagcacggctacaccgaa

SEQ ID NO: 18252 - DNA, 306 bp, Zea mays
  Clone ID: LIB84-026-Q1-E1-B7
gcagagcatcctggccatctgggcggggcaggtggtgctcatgggcgccgtcgaggggtaccgcgtcgccggcggcccgctcggagaggtgggggacccgcggtaccctggcggcagcttcgacctgctcgggctcgccgacgacccggaggcgttcgccgagctcaaggtgagggacattaagaacgggcgcctcgctatgttctccatgttcggcttcggcgtgcaggctatcgtcaccggcaacggccggcgcgagaagctcggcgagcacatcggcggcgccgtcaataacaacgcctgggc

SEQ ID NO: 18253 - DNA, 333 bp, Zea mays
  Clone ID: LIB84-026-Q1-E1-B8
agcgggggctggagcactcagcactggggagggatcgcagcgccgcggcgagatattgagcagcagcctgtcctccgggatctctggctcacgggctgcaggggccagcaccgctctggacccccatgacgcagcgccgcagcagctgacgagggtgaaggcggcggcgcggggacggctgctgcacgccggccgccggcgttcgagtgtccggaggatgccgggcggcggcgccgtggtggtgagggccgggcctgggccactgtcgcggatcgagccgggcctggaggacgacgccatcgacgtgtaccgcatcaacggcatcaacccgga

SEQ ID NO: 18254 - DNA, 426 bp, Zea mays
  Clone ID: LIB84-026-Q1-E1-B9
agcagcgagcgagagcagcacacacgcagctagctaggagcagcagcagagcagcggcgatggcggcctccatgatctcctcgtcagctctggcggtggcgcctcagggcctgccgcccctcggccgccgcgcctcctccttcgccgtcgtctgctccaagaagaagatcaagaccgacaagccctacgggattgggggtggcctgaccgtcgacgtcgacgccaacgggagaaagggcaagggcaagggcgtgtaccagttcgtcgacaagtacggcgcgaacgtcgacggatacagcccaatctacaacgaggatgactggtctcccaccggcgacgtctacgtcggtggaaccactgggcttctgatctgggccgtcaccctcgctgggatcctcggcggcggcgccctcctcgtctacaaca

SEQ ID NO: 18255 - DNA, 128 bp, Zea mays
  Clone ID: LIB84-026-Q1-E1-C1
atgtctagctggtcggaaaccgtgagagggacgaatccggagatgcaatctggcttgttggccgttgcattgcagcacctattgtgtcgttatcagttcgttatcaattatctggctttaagtgtggc

SEQ ID NO: 18256 - DNA, 420 bp, Zea mays
  Clone ID: LIB84-026-Q1-E1-C12
cccacgcgtccgcccacgcgtccgcccacgcgtccgctgagactatccaatatgaaaaagatcgcaatgcaggttttctatcaccatttgggtactcaacacctacagtaacatcagcagtagatgctatatgttcaatggagtggtattggctcttggcatcaaaatcccaagtatgcatcgaggggaaatattctataagaatttggagatggaagggttatcttgtacagtacacctttcttggcaacgaaggtccacctgttcttcttgtgcatggttttggagctttcctggagcattttcgtgacaatatacacaagattgctgctacgggccaccgagtttgggcaattactcttgttggctttgggaaatcagagaaaccaaatgtcaactattcagaacttttctggtccg

SEQ ID NO: 18257 - DNA, 303 bp, Zea mays
  Clone ID: LIB84-026-Q1-E1-C2
gaccgcggcatggccgccggcctcggagtcccccgcgccggggccccgttcatcctcctccgcacctcctgtttctctccgtgggcacctctggtgccccgccgtcgacttctctctgggcctgccactgccggtgatcccccgcccccggcgctcgcgccaacttcggggctcgccgccccgccggttgtgggaacgccggagcccccgctgccgtttacggccgtggaggcggagatccttcgcgatattgagcccgtcggcgtggtcatcaaggatatcctccactccgacttatactgg

SEQ ID NO: 18258 - DNA, 254 bp, Zea mays
  Clone ID: LIB84-026-Q1-E1-C3
agcaggagagatgcggcggcggcgggggcacacgtgggcgggggtggggaagacggcccacgcggcgtctgcgcacgccgcgctcttctgcttgactctggtcctcgcgctcagggtcgacggacgcaccacagactcctggtggataatattcattccactatggctctttcatggtagtgttgcgcgtggaaggttttcaatgcctggcccttcattacctcatgggcgtcattgggcaccatgtcattcga

SEQ ID NO: 18259 - DNA, 317 bp, Zea mays
  Clone ID: LIB84-026-Q1-E1-C5
cgcagcagcagcagcagcggctgaggctgcggcggagcagcttcagcatggtgcggcgcgagcgcgagcgcgcggcgcgggatgcgtggctgggccacgcgtgggagatgaagcggagctggcaccagcgcaacggcggcgctcccgacgcgggcacccccgtggtggtggtggtggggacgtcgtcgtcgtcgtcgtcgcactcggaccatcaggccaccgcggcgggcggcagggtggccatggacgtggcggaggtcggcgcgtggcgggacctcgggctggagctgccctccgactggcacgtggagatccag

SEQ ID NO: 18260 - DNA, 330 bp, Zea mays
  Clone ID: LIB84-026-Q1-E1-C6
cacgcgtccgcggacgcgtgggttggaagcgcttgacacgcaggtgacggcggcagcgacggcgctcagactccggcttttagtgacgggatgggcggtttgcccctcccgcctcttgccagtcccagcgcgccctcgcctcgggtcctctgcacaccgtccagtgaccttgcgtggtggactggataaagttttgcagcgagtttaccgcaagtgatggggagacagcatgcattgcttgataatcttaatcagggggggcccagggttcggtacgattgggtgatggttttaaactgtcagctgctgataatgatgtggttgcaactg

SEQ ID NO: 18261 - DNA, 325 bp, Zea mays
  Clone ID: LIB84-026-Q1-E1-C7
gaaacacaccttatgcgcacggggtcgaggatgcagggtagaacacgaaaacaggaattcttgcacaaccagatgatgcaaagagggatgtggaaccgcctcgcaagtcgcctttgcacccaagggtctacaaaactaatcctcaagaccaaggtccaaggaacccaccggatcgaccaagacctgaacttgacaaccaacgacactctgaccggcggaggcaccgtgagtctgcaccacgaagacattgggggcgtcagggggtgccggggagtagcgctgggacaccaagaagcccctacagaacagctgctgggtctgcttc

SEQ ID NO: 18262 - DNA, 418 bp, Zea mays
  Clone ID: LIB84-026-Q1-E1-C9
acggacgcgtgggcggcggcgacgagaagtggcgagccccgagagcgggtttagttagaggctacgggcggtcgggcgcggcggcggcggcggccatgagcagcgggagcgagagcactaccgccagcaggtggcccgagctggccacgctgcgcgccctggcgcgcgacgccgcggagcagctgcggctgccgcgggccggcacgtcggcgtcggcgtcggcgtcgtcgtcgccgtggcgcgggcgcgaggaccacctccacggccacggcaagacggccaaggtgatgcacctgctgctctggggacccaagtgaagcggcgagaggccaccgtaccgccggcgttgctcgttttgctctgcctgcaatccgccccgcacggactgtactgtactgtacctatacacctatatact

SEQ ID NO: 18263 - DNA, 324 bp, Zea mays
  Clone ID: LIB84-026-Q1-E1-D1
tgttgagaaatacgaaagtggaatgtgggtcgagtcttagtcggatatttcatatctcttctcttcttgtccaaacagatggaagaggagatgatttgtgctgaccggaaaatccatatctctcgtagccatttagagcatacggatcgatttataagaatcgaatgttgggtttttatgttattttgtgatagaatggaaagaattctagacagaaggggttgggaattatgcctacatcacgtattggtggagggttcagtgattggacggtcgcagattgtaccaatattttacttcaaataattccgacaagctccgggg

SEQ ID NO: 18264 - DNA, 413 bp, Zea mays
  Clone ID: LIB84-026-Q1-E1-D11
agcgaaaccgcagccgtgacggatccagccgaaccccctcgcagtcgcagccccctcacgccacgcgacatgggcaagatcaggatgcccgtgccgtccctgttccgccgccgctcctccaagccgccgccgccgcagccgcagcagcaggcgcctgccgcgggcgacggcgacggcagcgggtccccggagcgggcgacggcggaggaggagatggcgcgcgtgttccgcaagttcgacgcgaacggcgacgggcggatctcgcggtcggagctggcggcgctgttcgagagcctgggccacggcgcgtcggacgacgaggtggcgcgcatgatggccgaggcggacgcggacggcgacggcttcatcagcctgcccgagttcgcggccctcaacgccacggtggccggcga

SEQ ID NO: 18265 - DNA, 382 bp, Zea mays
  Clone ID: LIB84-026-Q1-E1-D12
cccacgcgtccgcggacgcgtggggccctcggcctcagcgagggagggccgctgttcgggttcaccaagtcgaacgagctgttcgtggggcggatggcgcagctgggcgtggccttctccatcatcggcgagatcatcacggggaagggcgcgctggcgcagctcaacatcgagacgggggtgcccatcaacgagatagagccgctcgtcatcttcaacgtcctcttcttcttcatcgccgccatcaaccccggcaatggcaggttcatcatcggcgaggaagaggaataggctgctggctgctgctgctggcctcggacatgagtcgtgtgcgtttacttttacctgtgactgtgcgtctcggtgcgcgcgcgtaagtgct

SEQ ID NO: 18266 - DNA, 191 bp, Zea mays
  Clone ID: LIB84-026-Q1-E1-D2
tgcagtttggagttcgcagcggcgagattcttctcgatgcaggagagaagtgtaaggagtgtgttgctacgcatggctctggtgccgcatggagcactggtgaagagctctgggacggtgccagattcagcaaggtgcagattcatgttcagaagactaattgccgctgcattacatcgcttgcatcatgt

SEQ ID NO: 18267 - DNA, 245 bp, Zea mays
  Clone ID: LIB84-026-Q1-E1-D3
aagccggcgacgccgcccagaggcgtggctatcttcaagctctcccgcgccgagctcgtccgcctccgttcgcatgtccccgcgcgcgaaaggcgcgcctcggttcagcacgtacgctgtgctggcagcgcacatgttgccgtgcgcgtccctgacgcgcggcctgccggtgcgaccagcccaccaagctatactgcgccaccgacgggccgcatacggtgcagccgccgcttccggagggctac

SEQ ID NO: 18268 - DNA, 257 bp, Zea mays
  Clone ID: LIB84-026-Q1-E1-D4
gggttgtaagggatgtttatcggggcaggcttgtggaggatggctatggctacggaccaacagccagcgcccaggagcacaaggattgcaatgtggcagctgcttgatggttgtggttcactacccgtttataccacaagaggggtcatattgtgcatcggaagaggttggcggcactagccgtcatccctcacctgtatataaaggcaatctgggcctatagtggtgcgatgtgaacatattccaggatttgctgc

SEQ ID NO: 18269 - DNA, 326 bp, Zea mays
  Clone ID: LIB84-026-Q1-E1-D5
cacgatagactgccaacaagaaaagggcagtgatggcaatacattgccaacaagaaagtacccagtgatggcaatgtatggccacgatacacggcaactcagtgaacggctaccaatgacaatcctgatctaagacttggccttctcattaatggcacgcttgttgtgccaagttgcgctcttatcacccttcagttggttctttcttgttggtcgtacgtgagattttattttcactgaatccgggtctaggtggaggttttcagtattgacagatgtcagatgttcaactttatgtggttatacaaccggcaacaacaggcacc

SEQ ID NO: 18270 - DNA, 329 bp, Zea mays
  Clone ID: LIB84-026-Q1-E1-D6
cacgcgtccgcccacgcgtccgccttgtcaaagccggcaatggtgttgccacccttggcctccctgactcccctggcttccccaacggggccacgtaccacactttgacggcaccctacaatgatgtgcaccgcagtgatcaaactgttcgaagacaaacccgtggagattgcgggcgtcctcctcgaaccagttgttggcaacgctcgtttcatccctccagagacatggtttccttaacgctctccgcgacttgaccaggcaggatggtgcgctccagggcgtcgatgaactgatgaccggcttccgtctgtcttacggtggacctc

SEQ ID NO: 18271 - DNA, 210 bp, Zea mays
  Clone ID: LIB84-026-Q1-E1-D7
ggggccccactggcagagctccgccatcgccgacctcggccggagcaccgagagcaggatcgcgatgcacttcgacagggtcttttggcgcaacgtcgaagtgctgggaatggtcgggccgacgcccaaagcgtgtgggtacttcctgaacctgcacaaagccagcggcaatccggtcctcgcggtacatggccgccggcaggttcgccc

SEQ ID NO: 18272 - DNA, 302 bp, Zea mays
  Clone ID: LIB84-026-Q1-E1-D8
gtccgccctgttctacaaccggggggggagcaagatggccccgaacgacgtgttcggcgtggcgttcaacggcggcgtcaagcagcggagcatgtggggcggcgagccgaggcagatgacgctgcaggtccgctggaaagccgacccgcccatctacaccatcaggaggcgggtgccgcagcacgccacaagcttgatcgtctccttcaccaacgggggcgagtgggacgggccgtacaccctcaagttcagggtcgcgaaggcgtggcagacggggcgctgagcttcttcaaccagggcct

SEQ ID NO: 18273 - DNA, 422 bp, Zea mays
  Clone ID: LIB84-026-Q1-E1-D9
agcccacgcgtccgtcggaatctgaagacctgaaccaagtttgatttacttttcaaaggcaagaatccagatagcagagttgaaatgttacccatggatttatcagctggtgaagaatctctgaaagaagtcgtacatgtggcagaatcatttttttctaatgcaggcgttgactatatggtccataatgcagccttcgaacgtcctgtaaatatcacccttattttgagttaatgttttaactcccttacccttcaaacatcatgttgttttattgttagtagtttttgatgatagatctgctagacatcactcctttttaatcatattctgaatcagatgatccctaaatgcatcaatttttaatcagattgcagaaacggagggctctagaagaaagtgaggaaggtcttaaggctaca

SEQ ID NO: 18274 - DNA, 246 bp, Zea mays
  Clone ID: LIB84-026-Q1-E1-E1
acaagtttgctaaaactcggtctagtgagtcagccacacggactgatccaaatgcttccaatcctcctgtttgtcctgcgacttctgtggcgtctggtcgataatggggagcttcttatgctcagcaagctgcatatcctgcatatggaacttatgactacagccatcaggtgccacttcctgctcctcaaacagctgcctatggtgcttatcctcgaggatactctgttcaggcctatacacaac

SEQ ID NO: 18275 - DNA, 425 bp, Zea mays
  Clone ID: LIB84-026-Q1-E1-E11
cggacgcgtgggcatgcaggctgctgagtgaaaatgggagtggcaggtcacaacgatccattgttaggtgaaacgacatgtgggtctttgctgcagcaacttcagctgatatgggatgaggttggcgaaagtgatgaagatcgtgacaagatgttacttcagctagagcaagagtgcttagatgtttataggagaaaggttgatcaggcttctagctccaggtcatgtctcctccaacagctttccaactccaaatcggaactgactagactcctttctgcattaggagagtcatctatttctggtgctcctgacaagacatctggtacaatcaaggagcaactagcagctatatcaccatctttagagacactccgcaggaaaaaagagagtacggtgaaagagtttgctcatgtacaacttca

SEQ ID NO: 18276 - DNA, 333 bp, Zea mays
  Clone ID: LIB84-026-Q1-E1-E2
gatcgtgggagtgagtcagctcatattcaagctcacggggccccatctgggccacctggagcatcagcaggttcagctccccaaaccttaattcgtaagtcgggttttggtgttcctccacagcagcctcaccaagtctatcagtcagaagcgcatctaagccattttatgatgcagcaagttccgaacagcatgcccatgcctgaacagcaacctaatagcatgcttggaacgcaacaaggtttgggttccttcaacatgggttgtgatcagggagcttctctcggagggccccaggcaaacaccccaccttcctacggctccgttggtggt

SEQ ID NO: 18277 - DNA, 325 bp, Zea mays
  Clone ID: LIB84-026-Q1-E1-E3
tacaagctacatccggtgacacggggttgtagttttgctgagctcatacgactgttgcagcacatgttgatgacgatcaacatcactccatttgcagcaaccatcaaaggtagcccactttgtgagatggcgcgatacagtttggtgaaccggcttgcgaatccaggcatggctctttttgctacgagtgtacatatttatcagagcaaccgcgttataggagtggacatagatgatgggggcttcaagcagcaggattgtcccaactgataaggatacgcccttttgtttgtttgctcaatacgtcggcttgagctgtttgtgt

SEQ ID NO: 18278 - DNA, 247 bp, Zea mays
  Clone ID: LIB84-026-Q1-E1-E4
cagtggagctagctagctagtataggggaatcaccaaggtggcgaggcagctcgttgtgcttgctctgcttttcgtgatcgcccggtgtggggcatggggcgggggagtgcgggagagcctccgccgacagggtggcgctaaggatggcgccatgcatctcggctgccgggggcccgcagtccacgccgaccagcagctgctgctccgctgtgcacaggatcgggcagagccccagctgcctgtgcg

SEQ ID NO: 18279 - DNA, 245 bp, Zea mays
  Clone ID: LIB84-026-Q1-E1-E6
caagtcggcggataaggacggggggaagaacgcgcccatctcacggtcctcccgcgcgggcctccagtttcctgttggacgaatccacggtcagcggaagcaaaggactcaggcaaatgggggcgttggtgccaatgcagccgtctactctgccgccatcctggagtaggggactgccgaggttctggagctggctgggaacgcgagcaaggatggtgaggtgaagcgtatcacccctcgccacc

SEQ ID NO: 18280 - DNA, 168 bp, Zea mays
  Clone ID: LIB84-026-Q1-E1-E7
cacgcgtccgcgcacagacgtcgacacataacacgtgtcccaaacactaatttttttaaaaaacaaaggcacaaccaacgacacaagacgcgcagcacaacaaaacaccaaaacaaacaccaaacaacacaccaaaacaccaaaaaaccaaaaaaaccggccgccccc

SEQ ID NO: 18281 - DNA, 309 bp, Zea mays
  Clone ID: LIB84-026-Q1-E1-E8
acgcgtgggcagctgttcgcggcggcgagcgcggcgcggggcggcgggtaccgcgccccggaggcggtggacacgcggggggtgacgtagagggcggacgtgtactccctgggcgtgctgctgctggagctcctgacgggcaagtccccctcgcacgcgtcgctggagggcgaggggacgctggacctgccccgctgggtgcagtccgtggtgcgggaggggtggaccgccgaggtgttcgacgtcgaactggtgggcgggggcgcggaggcggaggaggagatggtggcgctgctgcatgtggccatg

SEQ ID NO: 18282 - DNA, 383 bp, Zea mays
  Clone ID: LIB84-026-Q1-E1-E9
cccacgcgtccgcccacgcgtccgcccacgcgtccgcccacgcgtccgcccacgcgtccgcccacgcgtccgccgctggatggttagaggatctgcatcttcttgtgttcttctgtaaaatacggagacttgggcagcataaaaagcttggcaaatttctgttgtgtggcatctccatgtaagtaacagtggactgcatgcagaagcgagcgttccagttttgcgacagaagggggcgtccgaagttgttgtactgctaatgaacgtcgaactagcatgataaaatgtatcccagcacatttggttgattgtgtcacactagaaagccatgtgacagcgtttggctatgatgctgtaccacctgaatttacatagctcctttt

SEQ ID NO: 18283 - DNA, 180 bp, Zea mays
  Clone ID: LIB84-026-Q1-E1-F1
gtctgttttccctaaggatagagtgatttcctgcctctttatattcactcttgttgtcaagtccaagtggaaaatcttggcatatgggacatattgtaataataagcatcgtacaatctagatgctgttttgtaataattaattaatatcccagcccattggatggaggtgtttaccaac

SEQ ID NO: 18284 - DNA, 420 bp, Zea mays
  Clone ID: LIB84-026-Q1-E1-F11
acccacgcgtccgcattattcatggagatgatccttgtcttctacctgatggcactgatgcatatgcgctagcgaagaaggtcgggcgttacaagcaaatcaagcgaacagaaggtgtctcgagcactgacatagttgggaggatattgctaacattcaggcagaaagatgctgacactgatttaagtgttgtcgttgctgagaagtctggagagaaatcaaatgatgaagtgaaaagtcagctatctcatttccttccaacttctcgccggatcatgcagttttcaaatgggcaggctccttcgccaggtgctcgtgttgtctatgtagatggcacatttgatcttttccacgctggccatgttgagttcctcaggagtgccagacaacttggtgactttcttcctgtgggtatctatg

SEQ ID NO: 18285 - DNA, 208 bp, Zea mays
  Clone ID: LIB84-026-Q1-E1-F12
agcgatgatgcaccagcgacgaccactgatgacgtttcaaggtgacgagcaagagccggcgctgccgtacagagaccttatgggctctcagttgctgcatcatttcgctgggtagcttgttacctacacatgcttgctagctagctaggagggtgggtatacggtggctaaatttttatatatattaaagacaaggtaaattttgttt

SEQ ID NO: 18286 - DNA, 319 bp, Zea mays
  Clone ID: LIB84-026-Q1-E1-F2
caaactgtcggataagccgcgggcgcgtcgccgtggggatggcgtccctctcccccgcgctcctccccggcgccggcgtgagccgcgggcgagcgccgcccgtgttccgcgtcaccgcctcgtcctcgagctcggggagcaagaagggcaagaagcccaagagcgggggcgagggcaaggacaccaaggcgctggagcctccagcgcccgtggtgcgccgcgcgccgccgggaagcgcctccatatgcgaggaggaagaaggtgaagcggcgtcgagggccgggggcgccggtgggaaagggcccacggaggaagagct

SEQ ID NO: 18287 - DNA, 350 bp, Zea mays
  Clone ID: LIB84-026-Q1-E1-F3
gcgtccggcagcgtcagctggatcctaaggactaccaggagcagacggcgcagcaccaggagcagcagcagcaccaccatcacccccacctgcaaatccaaatcgaccagccgccgccgccgccgcaggacgggggcggcggagtgaaggagcagcagcagctgctgcaggtggtggcgcagccccgggatcggaggcagcaggcgctcgcccccaagcggagctccaacaaggaccgccacaccaaggtcgacggcaggggccgccggatccggatgccggcgctctgcgccgcgcggatcttccagctcacgcgggagctcggccacaagtccgacggcgagactgtg

SEQ ID NO: 18288 - DNA, 303 bp, Zea mays
  Clone ID: LIB84-026-Q1-E1-F4
accctcaacaagtctcagttaggagacgctgactttaattgggactgcaatactcaagacgttgagaagctgttacgcttgacgttggcttggacgctggtgacatatgatcaattggagaccaacttgcctcactcattaagctatgggataatcagtgttgccgtcagaaagctagtatgcctcgctgctcgtcatgattacagtggtagcgtgagtgatgcaactatgacatatttcgacaggcgggctacggtgtgtctacacaactgggtaaattaagtcctcaatcactgtctacat

SEQ ID NO: 18289 - DNA, 303 bp, Zea mays
  Clone ID: LIB84-026-Q1-E1-F5
tcctccgccagcttcaggacggatacggcggctgcgcgctccagtcggagctcgtcaagctcgccttctcctttgacgcgctgggccggcgcgtggaaccctaccggcgtcgaggtagcccgctcttcgtccttctctaccgccttccgcgtgtcggagccaggccagtacacgcgcgtcttcgccaactgcctcggtggcgagctcaaggtcgacatggaggtgcgctccgccatgtgcaacgtcgacccgggagggggcgagggcgagtgggtctgggggggaaccttcggcgctgccctc

SEQ ID NO: 18290 - DNA, 235 bp, Zea mays
  Clone ID: LIB84-026-Q1-E1-F6
aatagattggatctatccggccggggttgagaagagttttagtattttttttgataaataataaaaggtgcacgatctcgaccgagtagggctgaaggacttcagaaatcatatggaagaactgtagcatttcgcgattcattggtaaatttactttgattctctagagagggataatgtgagaccattaacacggttacagctaaactgcttgaaggccgggcaaaatagggta

SEQ ID NO: 18291 - DNA, 195 bp, Zea mays
  Clone ID: LIB84-026-Q1-E1-F8
gtcatcatgcacagacattgagcgcgcaggcaaccacgaagagtccctatgtttagggcagcccaggaacatcaggttgatccaagggtcggccagtagaaaactacagatctgatctgaatagctgatcatgcccaatgttcatagatttgtccaggctgactgatgcgggcgccatacaatacttttgcattc

SEQ ID NO: 18292 - DNA, 332 bp, Zea mays
  Clone ID: LIB84-026-Q1-E1-F9
agctagttctagatcgcgagcggcgtggcttctctccccgctcccctcctgcccctttccttcgtcctcagatccgccgattccccgtccctgcgcctccgtctcatgatctctgcgcctctgcgggtgcggctgccggcgccgaaggctgccgccggggggtcgttcctgctcggcgcgtcctccgtcgagtccaatcccaatcccaagcccaagcccagcaggatccgctgcgccgccgccacgctgtacgacgtcctgggcctgcgcgccggcgcgacgggccgggagatcaaggccgcgtaccggcgcctggcgcgggagcggcaccc

SEQ ID NO: 18293 - DNA, 403 bp, Zea mays
  Clone ID: LIB84-026-Q1-E1-G10
agctttgaatatgttgggtctggcgaagcgaattggtgcaaggtttttgttgactagcacaagtgaagtttatggtgatccgcttgagcatccacagaaggagtcatactgggggcacgttaatcctataggtgttaggagctgttacgatgaggggaagagaacagcagagactttaactatggactatcatcgtggtggtggtgttgaggtgcgtattgcccgtattttcaatacatatggtcctcgtatgtgcctcgacgatggtcgtgtggtcagcaattttgttgcacaggcactgcgaaggcaaccgatgacagtctatggtgacggaaaacaaactcgaagtttccaatatgttgctgatctggttgctggactgatggctctaatggagagtgat

SEQ ID NO: 18294 - DNA, 426 bp, Zea mays
  Clone ID: LIB84-026-Q1-E1-G12
agcggacgcgtgggttgtggatgaggtcaaagacaaaagtggccaacagatggatgtgctctcatggaagcaggaaggtgtcaaaaaccttcctttgcaggagaatggatgggactgcggcatgtttatgctcaaatacattgacttctacagcagagatatggacctcattttcggacagaagcaaatgcattacttccgcaggaggacagcgaaggaaatactgagtttgagagctgaataaaccttggaggacatcataagtcattttggctatgttcagaattgttggaatatgtacttaacaaatgggtgcagcggcttaaaggtatagcactgagtgcaaggaatttggaaattctccagttgcacaacggcaccaagcgatggccaagcaaccggtttgaattttgcatgagcacagtg

SEQ ID NO: 18295 - DNA, 236 bp, Zea mays
  Clone ID: LIB84-026-Q1-E1-G3
caacgacctccacgccggggcgtgtgcgattggcggtagcacccagtacacggtgaacaaccagattgtcaacgccaccctgaggcacgtgtccgacaaccccatcaacgtgcagctctcggtgatgtacaacaaggaggtcaacccccgcgtgcccatcatcgtcaccagggactacttctccacgctgtacgcaccgctcatccacgacagcctgatggagaagttctactggg

SEQ ID NO: 18296 - DNA, 71 bp, Zea mays
  Clone ID: LIB84-026-Q1-E1-G4
gggtctccattatgaagcaggggggagtagacctgtccgtccttctgctgcccaacatattatgcgagaac

SEQ ID NO: 18297 - DNA, 377 bp, Zea mays
  unsure (1)..(377): unsure at all n locations; Clone ID: LIB84-026-Q1-E1-G5
gacgcgtgggcggagcttagccctggtggagaagttaacatgtgacatggagactttcacgaagcattgttctgttcaggttcaagcagagttcgagctcccacgtgcatcaatgtgcgagttctcgcagatatggtctggtcaacactgccatccggatcttggctagacgcgtcctgcttgctagggtctcagagagtgctgggaccctatagccaataagtagtccttaggattcagtcggaagggtttggagggcgtttgnncagcgccttggtgttccttgaacatcagggagggagggcagatgagtagtttcacaggaggtgaaccccttacgaagataatctcactgaaagttctggatttgtcgttca

SEQ ID NO: 18298 - DNA, 204 bp, Zea mays
  Clone ID: LIB84-026-Q1-E1-G6
taactgaaagacaagcttccccgcttttcaagagtagagtgaaatcacgtatgctcgcagaacaatttttcccaccaacatctcgatttctcttaaaccttttttttcacttccctatcgatatcatgggatttcactgtaatctctgggtatcatgtatgtaacagctacaactttatatcatacttggcttaccggaatgtt

SEQ ID NO: 18299 - DNA, 93 bp, Zea mays
  Clone ID: LIB84-026-Q1-E1-G7
aaacaaaaaaaaaaaaaacaaaaacaaaaaaaaaaaaaacaaacaaaacaaaaaaaaaaaacaaaaaaaaaaaaacaaaaaaagggcagcccc

SEQ ID NO: 18300 - DNA, 401 bp, Zea mays
  Clone ID: LIB84-026-Q1-E1-G9
aaccggatctgagccagcagctgagaagaggatgagcgccgtggccgccatggcgacgtcgtcgctgaaccccaacgcgccgctcttcatcccggcggcgtaccggcaggtggaggaattctcgcccgagtggtatgagctcgtcaacaccaccgcctggttccgggaccactggttccgccagcaccagcaccacgaggccgccttcgccgccgccgccgacgccgagctcgacgtcgccgcgctcctccccgacgactccgtcgacctcctcgacaccgacgacctcatctacgcgcctgacgtccaccaccctcaacaacgccaagccggcgctgctgcccggggtactacctctgacatgctcaacgtgcgctgagcctcaggctccccccggggcc

SEQ ID NO: 18301 - DNA, 303 bp, Zea mays
  Clone ID: LIB84-026-Q1-E1-H1
caccggcgtccggcggtgggagcaggatggtggcgttggctgagccggcggatcggggtggctgcggcagctgccaggtgcatcgcccgcggggcgttgggatccgcctcatcctcgcccaaggccttcgtgaagtccaccgtctccgcccacgacgtcgtcatcttcgcggggtcatactgcccgtactgcaaaagagcaaaggccgtgtttaatgggcttgagttgaagaaagagccatatgttgtgggggccggatgagggagaggatggctcgcggattcaggatgccttacctgagat

SEQ ID NO: 18302 - DNA, 421 bp, Zea mays
  Clone ID: LIB84-026-Q1-E1-H11
agcccacgcgtccgatgcgcaactcgctggagaactactcctacaacatgcgcaacacgatcaaggacgagaagattgcgtccaagctgccggccgatgacaagaagaagatcgaggacgccatcgacgcggccatcagctggctggacgccaaccagctcgccgaggcggacgagttcgaggacaagatgaaggagctggagagcctctgcaaccccatcatcgccaagatgtaccagggcgcgggtgaagacatgggcggcgctggcggcatggacgaggacgcccctgccggcagcggcggccctggccccaagatcgaggaggtggactaagcggtttgttgtcagtcttgagtgtgctgcagttgctggctggcccagttgctgccgagagttatcgtcagttggtgcggtgtgtc

SEQ ID NO: 18303 - DNA, 436 bp, Zea mays
  Clone ID: LIB84-026-Q1-E1-H12
cgagtgagtgaacaccagccgtattgtcccgaccccgaccgatcctcgcctgctgcagccatggcgacctccgcggcgctctccaccgccgccaatcccacccagctctaccggtcccgcgctttgctgggcaagccggtgaaggggcttggcctgagcatgggccgcgagcgcgcccagcggagcattgtgtgccaggcggcgagcagcatctccgccgaccgcgtccccgacatggagaagcggaagctgatgaacctcctcctcctcggcgccatctcgttgcccaccgtcggcatggtcgtcccctacggcgccttcttcgtccctgccggctccgggaacgccggcggcgggacctacgcgaaggacaagctgggcaacgacatcaccggttgacgcgtggctcaacaagcacggtcccaacgaacgcaag

SEQ ID NO: 18304 - DNA, 196 bp, Zea mays
  Clone ID: LIB84-026-Q1-E1-H2
ttgtgtgaggtaggtgtacaaactggcgagcgctctttccctcgctctatacctctctgtctgcgacgcggttgggtaggctaccgccgcggggtgccgactgccgatgccctcaacggcggcgaaaaccgcccgccagcaatggcagcaaggtgtattagcctttccggggcgtccttgttcgtccatggacccc

SEQ ID NO: 18305 - DNA, 354 bp, Zea mays
  Clone ID: LIB84-026-Q1-E1-H3
tgaagctgtgtatgggggttaaaggggcggagacgcagtgaagcactaggaatttctcgtcagttgtgcaacctcgccgcggagtcaggggttgtcaggggatgtctgcatcggcgataatagacactgagaacgacgaagaagtaatggttgaagaagaaggagtgtggcgaccaacacctgaagacccacctgcgaggaactacttttatttggacttgtggacagagccgactccctatgggagagcgaggtggcggagcaatttggagagcaagtggtacatggggatctcaagtctaagtatcgaggttaccaatcacgtgaagagcgagcgggtacctggggatccca

SEQ ID NO: 18306 - DNA, 162 bp, Zea mays
  Clone ID: LIB84-026-Q1-E1-H4
cgctggcagacaacacctcagcgatatgcagagccgcatgccctgcccacctcacaatgccatcccagcctgctcccggagatccggggggtcctggaaacaagtcctatccccgccgcctacaccggccgttcgcgctcacctaatcacgacattctttct

SEQ ID NO: 18307 - DNA, 337 bp, Zea mays
  unsure (1)..(337): unsure at all n locations; Clone ID: LIB84-026-Q1-E1-H5
ccgagctcatcggcgagatggccaaggggtccgagctgcgggcgcacgtcgtcaacttcctcaacgtcgtcgtcgacgagttgggcgcgtcgagggtgccggagatcgtcgtcgagttcgagaacgtgtacaactcgctcacgggcaccgaggtcgccaccgtcacctccgtcggggagctcgagtcgcaggacctcgcgcagatcgcgcagcacgtccaggagatgaccggcgccaagaacgtccgcctcaagagggagggcgacgangcggtcagcggcggcgtcaccgtgcagtacggccgcgaccgctcgaacttcagcgacatgagcgtccg

SEQ ID NO: 18308 - DNA, 233 bp, Zea mays
  Clone ID: LIB84-026-Q1-E1-H6
tcgccgccggccaccccactgcggtgctcgtccgcgcacgcagcaacaccacgctagagcttctcgagaccagcaagggcagcgcggggaccgttgattggaagtgacatctacgaccaccagagcttggtggcggcgttccaccaggttgacgtggtcatctccggggtgggccatcacggaccgcatgacctaaaagacggacagctcacgagtgtggcagccatcaacga

SEQ ID NO: 18309 - DNA, 244 bp, Zea mays
  Clone ID: LIB84-026-Q1-E1-H7
cgtcgagtccattgccatagctggtgttgctaggtgctcttacattcgggctaagattgaagaggagaaaaggaaaaagagcgcatgactgctgtggagaagattatcgagaccttcctcggacacaacatcgtgcacaatcacgacctacttctatatcttgttttgttttcatcttggggcaatccgtccattgtttgttcccagtctggtgattaaaagtccgcagattctgtttgtggaa

SEQ ID NO: 18310 - DNA, 139 bp, Zea mays
  Clone ID: LIB84-026-Q1-E1-H8
aggacggctgcgctcagtcactttgacaggttcatcgtcatgctggcaatgatcaaaaggggggctgctatcaggcaagaactcgccacgctgaagaatgcgtccacagggtaaatcccttctggtggatggcatgtta

SEQ ID NO: 18311 - DNA, 381 bp, Zea mays
  Clone ID: LIB84-026-Q1-E1-H9
agctgattccttcgcatatccccaaagcaagctcgagtgaagaaactcacgaaatctgaagccagctgagagaggcggatggggcagtgcccgtgtttcgggtccgcaaaggcggcggaacaggagcggcgggcggaggcggaccggcgcgagtcgcaggatgctcgcgccaaggccgccgaggccgcgcagaggagacagcaggactatgagaaatcggcagctggaagggcagccaaagcacaaatgaaagcaatgaaggaatcaaaggcatcaaaccaatgtggagagccggttcttaagtggcagatgggatcatgagtttcgtttctgttgatttgcatccctccgcttgtgaacttttgaatgggccgaagaaaa

SEQ ID NO: 18312 - DNA, 389 bp, Zea mays
  Clone ID: LIB84-027-Q1-E1-A1
aggcaaccgttcagcgcccttcttggggatgctcctagtgttgacgtcaagaagaatgtgattgtggccattacctctgataagggactctgtggtggtattaattcaacatcagtgaaagttagcagggcccttcacaaattgacatctggtccagaaaaagaaaccaagtatgttatattaggagaaaagggcaaagttcagctgttgcgtgactcaaaggacagcattgaaatgactgcaactgaactgcagaagaaccctatcaactacacacaggttgccgtgctcgccgatgacatattgaaaaatgtggaatatgatgctctgagggttattttcaacaagttccaatctgtcatatcgtttaagcccacaatgggaacaat

SEQ ID NO: 18313 - DNA, 357 bp, Zea mays
  Clone ID: LIB84-027-Q1-E1-A11
gcgacatgtcggccacatggcggaagctcgacgaggaggtcgcggccacgccgatgcctgacatctaccagaagcacatggtgtggatcctgtgcaacgactgcagcgcgacctcgagcgtgcggttccacgtgctggggcacaagtgccccgcgtgcagctcgtacaacacccgggagacgagggctgtgtgccccaggatctgaggcgaaccagaggctatgtcaaaatgccagggagatgccgtccaacgactggtggagatcatctgtccgcaggacgttgctgcgcttaaggttaaaggctagcgcgagaccaagcctggttgtccagtcttgactctggtgctgtccaggc

SEQ ID NO: 18314 - DNA, 373 bp, Zea mays
  Clone ID: LIB84-027-Q1-E1-A12
gaattcacggctcgacgacgcgtcagatgactatgttaatatctatcttaaaagcgatatgaaaagcattcagacgaggaatgtgctgtcgacaatgctctccacatggcccatcacggttcatgattccgggccaggttagcttaccagtcaccatcggtggcacattcagggagtcaatcaaggagtatgtcggcaacaccttccggtacaccatcaagtggatccagatctgtgtaactggccctggcatattcttcataaaactcatggtccacgacaagaacatctccgtggagatatcgtcggctacatcgtccacgtacacgaccatctaggacctcgtccaagaggtcaaagctgcagagaaggt

SEQ ID NO: 18315 - DNA, 400 bp, Zea mays
  Clone ID: LIB84-027-Q1-E1-A2
cccacgcgtccggtcgtcttcgtcttcctcgggatccacgtctacatctccgcgctgtggcacctcgccagcgtcatctccgtgctcgagccgctctgcggactcgccgccatggccaagagcaaggatctgctccagggccgcaccggcaccgcagccacgcttgtcgtctcctacttcgcggtctgcggcgtcacctccgtgctgttccgtgccgccgtcgttaaggggcgcgccgaggaggggagcttcggtctggccttgcccgggcggctgcttgtcggcgccgtgctgctgtgcgttcttgtctgtgtcaatttgctgggactgctcgtgcagagcgtcttctactacgcctgcaaggccttccacaaccagcagattgacccggctggcgttg

SEQ ID NO: 18316 - DNA, 433 bp, Zea mays
  Clone ID: LIB84-027-Q1-E1-A5
acagctcatgcaccctggacggctcgaagctcgtggtctcaggtggctgcgccgagtccggcgtcctcctcagcgacaccttcctcctcgacctcaccaaggagaagcctgcgtggagggagatccctacgtcctggtcgcccccgtcccgcctcggccacaccacgtccgtctacggcgcgaccaagctgttcatgttcggtgggctggcgaagagcggctcgctccggctgcgctccagcgacgcctacacggtggacgtcagcgaggacagcccgcagtggaggcagttggccacgacgaccgggttcccgaacatcagtccgccgccgaggctcgaccacgtcgcggtgagcctgccctgtggacggatcatcatattcgggggctccaacggcgggggctcaaatcccccggggcagctgttcccgga

SEQ ID NO: 18317 - DNA, 382 bp, Zea mays
  Clone ID: LIB84-027-Q1-E1-A6
ggagctcgcctccaacctctccacctacaaagagcagctacgcgaggtcaagaagcttatcaaggagaagaaggatgatgctggaatttctgaatatattgatatggagaaagagcttcaagatgtcataacgttaaccgaagagattttggcaactgcaaagcaaactgagagtgcccagaatgttgcaggtctatcaccgccaagctattcagctggagtgcagtctgagggactggatgacctttcacattcccataagtttgccgttggtactagagttcaagctgtgtggagtgaagatggagaatggtataatgcaaccgttgaagctttgacaccaaatggatactatgtagcctacgatgggtggggaaacagt

SEQ ID NO: 18318 - DNA, 363 bp, Zea mays
  Clone ID: LIB84-027-Q1-E1-A8
gccctgctcaccgccatcgaccgcgaggcggtgtacgggtactacgacgacccctgcagcgccaactcgcccctgatgaagaagatccgggccgtgctggtggaccacgccctcgccagcggcgaggccgagaaggacgccagcgcgtccgtgttctccaagatcaacaggttcgaggaggagctgcgcgaggcgctgcccagggagatggaggccgcccgcgtggccttcgagaccggcgccgcgccgatcgccaacaggatcaaggagagccggtcgtacccgctgtaccgcttcatccgccaggacctcggcgccgtgtacctgaccggcgagaagctcaagtcccccggcgaggagtgc

SEQ ID NO: 18319 - DNA, 266 bp, Zea mays
  Clone ID: LIB84-027-Q1-E1-B1
aaccaaaccttcgcccaagccttcgcccacgcgtccgcccacgcgtccgaattcagatactagcgttgcgttgggttgcgtcgattatatgtttcttctcgggacgcgtgtcgcgtgctcggctcggcagtcgggctccgatttctggacggacccgacggaggcgatccggcgcgcgtaccaccgcacggaccggaagctgctgaagaagacggcgggcgacgacagcggcgaggggatgaagaagggcaggcggcccggcgggt

SEQ ID NO: 18320 - DNA, 389 bp, Zea mays
  Clone ID: LIB84-027-Q1-E1-B12
agcttgtactagagaaaaagtaacagaatcatctctggcttttacgcatcctagtacccagcaacagatgcttatgtggaaatcacctccaaagactgtcttacttttgaagaaattaggagatgagctcatggaagaagctaaagaggttgcttcatttctgcatcatcaagaaaagatgaatgttcttgtggaacctgatgttcatgatacatttgctagaattccaggttatggttttgtgcaaaccttctatactcaagataccagtgaccttcatgagcgaattgattttgttacatgcttgggtggtgatggactcattttgcatgcatcaaacttatttagaacttctgtaccacctgttgtctccttcaatctcggatctc

SEQ ID NO: 18321 - DNA, 367 bp, Zea mays
  Clone ID: LIB84-027-Q1-E1-B2
acccacgcgtccgagaaaagaaaaggaacctgtcttgatgtcgtcgtcgtcgctgtctccgacggcggggaggacgtccgggtcggacggcgactcggcggcggacacgcacaggcgcgagaaacgccggctgtcgaaccgcgagtcggcgcggcggtcccggctccggaagcagcagcacctggacgagctggtgcaggaggtggcgcgcctgcaggccgacaacgcgcgcgtggcggcccgcgccgccgacatcgcgtcccagtacacccgcgtcgagcaggagaacaccgtgctccgggcccgcgccgccgagctcggcgaccgcctccgctccgtcaacgaggtgctccgcctcgtcgaagag

SEQ ID NO: 18322 - DNA, 329 bp, Zea mays
  Clone ID: LIB84-027-Q1-E1-B4
acagcgcgcgactgacatgtcgatgctcaccagcatactgggccgcaagcatcagcagccgccgccgccgccgcagcagcagcagcagcagcagaagggcggcggcgcgcgcactggcaccggcgccggcgccggcacggaggcggcggcagtggagccggtgagcatcgacatcgcggagcaggggccgctagtggacgccatcacgctggcggcgttcgcggcgccggcgctaggcctgccgccgttcgcgacggccagcatggactggaaggagacgccgacggcgcacgtgttcatggccgacctccccgggctgcgccgcgacg

SEQ ID NO: 18323 - DNA, 261 bp, Zea mays
  Clone ID: LIB84-027-Q1-E1-B5
ctttgtgtatacaggaaacaaaagggctcacttgctgtctttgctgggacagcttttggtaactgtgcgtgtggccatgtaccagggagtattggaagttagaaagatacaatctgcaggaaaaaaatgctagtgtatttcttcattctgccccatatttactcaactgttgaaaggtgtaagctgatttgaatatcgtatcagcattagttaagaggttgattgatatcatattcttgtaatgatagaatattctattgg

SEQ ID NO: 18324 - DNA, 369 bp, Zea mays
  Clone ID: LIB84-027-Q1-E1-B6
ctcctcgccatcacataaaaccagtgcaagcagaagcagcgcaatggcgagcagcaccatggccctctcctccacagccttcgccggcaaggcagtgaacgtgccgtcgtctctcttcggcgaggcccgcgtgacgatgcgcaagacggcggcgaaggcaaagccggcggcgagctccggcagcccgtggtacggccccgaccgcgtgctctacctgggcccgctgtccggcgcgcccccgagctacctgacgggcgagttcccgggcgactacggctgggataccgcggggctgtcggcggacccggagacgttcgccaagaaccgggagctggaggtcatccactcccgctgggccatgctgggcgc

SEQ ID NO: 18325 - DNA, 386 bp, Zea mays
  Clone ID: LIB84-027-Q1-E1-B7
acggacgcgtgggcggtgagcatcgccccgcgctggcaagggtgcaccctgtcccagaacgcgtgctggtcgcggttgctgcacaccgtggcgttgggcaggcagtccgcctcggcgccgaacctcccgcccccgcagcacgcgtcggcgacgtccgtgtaccccgacgcccccgggtcgtcgaaggtggccatcgacaggccgtagtagtcggcgagcgagtaggtgaagcccggcaggcgggaggcgaggctggcgagcaggaccgcgagggcgtcgtccaggcccgacgcgagctcgttcaggccgtccaagcacgcgcccgtcttcgtcccgccggacagccgcgccacggggacgcagccgagcagccccacgttgatgat

SEQ ID NO: 18326 - DNA, 367 bp, Zea mays
  Clone ID: LIB84-027-Q1-E1-B8
agatccaggccagaatcgcgcagctgaagagagagctttctcagacggactcgacgtatgactctgagaagttggcagagagaattgcaaagctttctggtggagttgctgtggttaaggttggagcatcgaccgaggcagagctagaggaccgcaagctccgcatagaggacgcgaagaatgcgacttttgcagcaatagaggaaggtattgttccaggaggcggtgcagcatatgttcatctatcgacattcgtaccggctatcaaggagacgttggatgatcctgaggagcgcctaggtgctgatatcattcagaaggctttggtggcacctgcagcgctgatagcccagaaggctgcggtgga

SEQ ID NO: 18327 - DNA, 199 bp, Zea mays
  Clone ID: LIB84-027-Q1-E1-B9
tggcggcggagggatggaggagggcaatttgtaaccttatgctgtttgttcgcttttagacggcgtggtgaagaactagtgtaaaaacggctttaaagtctattttgtgcggtagttcgtgtaggccgcttcgtcccgaagcgatcttggtaaaagacttattcgtgttgccaaaaaaaaagaacagacacaaaaagaa

SEQ ID NO: 18328 - DNA, 291 bp, Zea mays
  Clone ID: LIB84-027-Q1-E1-C1
aacgacgctacccaactcctcagccggatccatcctcatgaacgcttctgcgctggcgtcacacgtcccacatatagcaagggtccccaaaccttgcattacccccgtgcccaaacatccccgtccccatggaccttgggataaggcctaaacggagatctcccgcgacgtccaccccaccgttaatatctctcaaggatagcactcactcccgcaggtttaaaaatggtgaattttcaagcccatcataattaaaaggttctaagataaaagcttctttctcatcaccct

SEQ ID NO: 18329 - DNA, 393 bp, Zea mays
  Clone ID: LIB84-027-Q1-E1-C10
agcggacacgtgggcgccctgcccgccgaagagcgcgcaagccccatctcgccctgcccgccgaagagcgcgcaagcaccaccgtcccggcagcgcggagatcggtccactccatccacgccgcgtcaggcgagcggggcgcacggacgctgcgaccgatggatctcaaggatagcctctccaaatttaagcaacagcaggagagatgccagtcatcactggcgagcatagctgcttcgacctcaaagccaaagcacagggcccaaccagcgcatgctcctaacgtcccagcaagaccatcacaacctattaagttttcaaatgatacagaaaggctgcagcacatcaattcgattaggaaatctcctgttggagcacagatcaagcttgtca

SEQ ID NO: 18330 - DNA, 208 bp, Zea mays
  Clone ID: LIB84-027-Q1-E1-C11
actccagctcttccacagggaagattagtgaacaatctaatacactggcatcatctgatagctccacaagtagcagggaatcagacagtattgacatgcaagtcactgacaaaagtaaaaactcagcagagaagcagagctagacatgtaatccagacagccaaaatctgagatctgagggtacatatctgatgaaatcattttaagc

SEQ ID NO: 18331 - DNA, 365 bp, Zea mays
  Clone ID: LIB84-027-Q1-E1-C12
agcggacacgtgggcggacgcgtgggtatccccctccgctccccgccgggcctgcatggtgttcgacgcttcgcccgagcgcccgaacgccgccacggcatggcttcctccatctccgccgccgctaaggcctccgcggcctttgcccaaaataaggagctggccgcgccggcgccgcaccgcgcgggctcgagccgtcggaccaagccgtgccgcgtgcgcgccgtcacgtcgcccgcgcgcaactctcgcgctccgtcgtcgaccggctcggtgaagaccgcgatgactatgacggagaacatcctggccagggcgtccgagcgcacggagctgggacccggggagaacgtgtgggtggacat

SEQ ID NO: 18332 - DNA, 385 bp, Zea mays
  Clone ID: LIB84-027-Q1-E1-C2
acagctccccccgcaaaaaccctagctttacctccccacaagcgcctccaagatgaagctcgtcaggttcttgatgaagctgaacaacgaaacggtgaccatcgagcttaagaacggcaccgtcgtacacggaaccattaccggtgttgacatcagcatgaatactcatctgaagactgtgaagctgacactaaaagggaaaaatcctgttacccttgatcaccttagtgtgaggggaaacaacatccgctattatatccttcctgacagcctaaacctggagactttgctggttgaggaaacaccaagggtcaagcctaagaagcctacttctgggaagcccttgggccgtgggcgtggccgtggtcctgggcgccgtcggggt

SEQ ID NO: 18333 - DNA, 376 bp, Zea mays
  Clone ID: LIB84-027-Q1-E1-C3
acccacgcgtccgcggacgcgtgggtcccaaagatagtaagttcttttttctttcttatggaaaaaggtctttttccaggattctatagaaatttcatatatgaaagaaacgaaaccgagatagttacctttcagaaaattcgaacgaaggatataggtctatctatgcttcattcttctgaaggtgggagaaaagatcaaactgattattgatcaaaattagggtttgaaacttaggtaattaacttcttctgcttaacccaagaagaaattggattgatttttgagaaatcgaattcagttaagataggggaaattaagatagcaatttctgagccgtatgaggtaagaaactctcaagtacggttctaaggaa

SEQ ID NO: 18334 - DNA, 346 bp, Zea mays
  Clone ID: LIB84-027-Q1-E1-C4
acccaagcgtccgcaatttgctgtctgaactgtagcagctctgttcatgtggatcactggtattattaacaggccaaagatttctggagcacagcttgtagccatcctacctctggctattgttcatactatgggcaatctcttcaccaagatgagccttgggaaagttgcagtgtcatttacgcacaccatcaaggctatggagcctttcttttctgttattctttctgcaattttccttggcgagctacctactatttgggtagtatcttctcttcttccaattgttggtggtgttgcattggcatctcttactgacgcatcctttatctgggccggcttttgg

SEQ ID NO: 18335 - DNA, 396 bp, Zea mays
  Clone ID: LIB84-027-Q1-E1-C6
cgtcggcttctccgtcagcgtcttcgtcgcgccgctcagcatcatgaggcgggtgatccagaccaagagcgtggagtacatgcccttctccctctccctctcgctcaccctcagcgccgtcgtctggttcctctacggcctcctcatcaaggacaaatacgtcgcgcttccaaacatccttggcttcaccttcggcgtggtccagatggtgctgtacgtggtgtacatgaacaagacgccgctgccggttgccgacggcaaggctgccggcaagcttccctcagctgcagatgagcacgtcgtcgtcaacgtcaccaagctcagcccgggccgactcccaccagtaacacagatggcggcggttcccaccaagagctgcgctacagaagcagccgc

SEQ ID NO: 18336 - DNA, 364 bp, Zea mays
  Clone ID: LIB84-027-Q1-E1-C7
gcaaccagataagtgtacttttgtcgtgaatgtcataaattatgcaaattcacttggcgaaagagtgtcatactacaatttcacaagaacaacccctaaaactcaacacataataacaactacagagcatttcgctttgagtaaacaaggaaaattctcgtggtggatatgatatatccagtttactcaatgattttgttgatgacaccagcaccaacagtcttaccaccctcacggatagcaaacctcataccctgctcacaagcaacaggctggatgagctgaacaaccatcttgatacggtcaccaggcatgcacatcttcgcctcctcaactttggcagtcataatcacagtcacagtcc

SEQ ID NO: 18337 - DNA, 384 bp, Zea mays
  Clone ID: LIB84-027-Q1-E1-C8
agaaggtctacttctggaggcccttcattcggttggatattccggggcactggcaaaacctttgatggcttcagaatctgctgtaaaccggttggatgttagcagcttggaggaatttgttgctgaacattacactgctcccaggatggttcttgcagcatcaggagttgatcatgatgcgctgatttcagttgtagaaccacttctgtctgaccttccgtgcgtgaaacgtcctgaagagccaaaatctgtgtacgtgggaggagactatcgctgccaagcagattctccaaacacacacatcgcacttgcttttgaggtgccaggtggttggaatcaagagaaaactgcaatggttgtgacagtgcttcagatgctcatggg

SEQ ID NO: 18338 - DNA, 348 bp, Zea mays
  Clone ID: LIB84-027-Q1-E1-C9
aattcaaggctcgacgacgcgtacgagcggaacggcatccagagcccgtcctaccggtgcctggccgcaggcatcatcaactggcaagcggacgtcgagaggtgcatagagtgggaagcccacagccgccgcgccactgggctgacgctcgccttcctcagtgccgcagcgaaggagctcggctgccctctcccgtcatgacaaggccattcctggatctgacatcggcttccaattgacggtcagtgctggcacagctgctgcagggtccgcgagtaggacggctccaatctctccatcacgttgtattatctggtgtttccataatgccgatttgatttcaatttg

SEQ ID NO: 18339 - DNA, 401 bp, Zea mays
  Clone ID: LIB84-027-Q1-E1-D1
acatagatgaagacagtgttgaatcagtagcttgaacagaaaactggtttagagagagttactattagagataaacagaggtcaccacgtgcaaagttatgccgggtgaaatttcttcatgagtgtcgactgctgcatgagcgtctagtggaatgtactgcgaaatttctagcacaagaacacagcaattttactagtgttccttcgtccttgcctgatgcattagatcttctagcaacatcagacaatagagtacgcttactcattgctgaggcacaacttttagcactagatgatgaacaaagctcttctgatgatggcgacaattctgatagtagatcgtcattgactatgaactgggaagatgcaaaagttacagatgaagatgcaacgaaaatacc

SEQ ID NO: 18340 - DNA, 385 bp, Zea mays
  Clone ID: LIB84-027-Q1-E1-D10
agcggacacgtgggcgcgctacaagtcagggcagtcaagtacttataagaagaacggaaaacctgctgccattcaatatggaaccggtgcaattgctggttttttcagtgaggatagcgttaaattaggtgatctggatgtgaatgattaggaatttattgaagctacaaaggagccaggccttaccttcatggttgcaaaatttgatggcattcttgggctaggctttcaggaaatatctgttgggaatgcaacacctgtgtggtataacatggtaaaacaaggtctcatcagtgaccctgttttctctttctggtttaaccgacatgctggtgaaggagaaggtggtgaaattgtgtttggtggaatggattctagtcactac

SEQ ID NO: 18341 - DNA, 388 bp, Zea mays
  Clone ID: LIB84-027-Q1-E1-D11
gcgtcagaccagatgcttttgtgccaaatccagcaaatgcatctttcaatgctacagctcaatcctcctcatgtgcagttcccaggcttgtaccatcctcagcaacctccctctattgtaagtccgcaccccatggtgcatcaacaggtgccatcggccattggtcccaatgttggggttggggtggcagctccaggcccgcaagttggagcttatcagcaaccacagcttggccatatgaattggagacccagcttttgaagaaggtttcttaattatctgtaattagggggggtcacaagagcctttatgtaacaacagtaggctccttttaacaggaagcacctttgtttttagtgcagctctttctgatctatttaagctataa

SEQ ID NO: 18342 - DNA, 395 bp, Zea mays
  Clone ID: LIB84-027-Q1-E1-D12
acgcccacgacgtccgcccacgcgtccgggaaggtcatcgacctcatctgcacgctcgtcttctcggtggtggtgctgttcaccacgatccggatgctgcgcagcatcctcgaagtgttgatggagagcacgccccgcgagatcgacgccaccaggctggagagcgggctctgcgggatggagggcgtggtggccgtccacgagctgcacatctgggccatcacggtgggcaaggtgctgctggcgtgccatgtgaccatccccaaggatgcggacgctgatgagatccttgacaaggtgatcgggtacatcaagacggagtacaacatcagccatgtgaccatccaggtcgagcgcgagtagggagctctgtctttggctgctgtcttgggcaa

SEQ ID NO: 18343 - DNA, 430 bp, Zea mays
  Clone ID: LIB84-027-Q1-E1-D3
actgctgacaacaccagccataccagaagacaggatgaaggagatcaccaaggcttcagaaggcttcgtctacctggtgagcgtgaacggagtgacaggtcctcgcgcaaacgtgaacccacgagtggagtcactcatccaggaggttaagaaggtgactaacaagcccgttgctgttggcttcggcatatccaagcccgagcacgtgaagcagattgcgcagtggggcgctgacggggtgatcatcggcagcgccatggtgaggcagctgggcgaagcggcttctcccaagcaaggcctgaggaggctggaggagtatgccaggggcatgaagaacgcgctgccatgagtccaagacaaagttaaacgttcagagaaaccttgagtactatccaaccaacaacctcgggggaagacgacgaccgaccga

SEQ ID NO: 18344 - DNA, 384 bp, Zea mays
  Clone ID: LIB84-027-Q1-E1-D4
gctcgctgctcgcccgctctcctccgccctccgccatggcggccttcccctccgcctccccgtcgccggcgatctccgcctcgacctggagcatggcttccctccgtacgtccctccccgcactccgcccctcccccgcgggaaggctccgttcgtcgttctcgcccgcggcggcggccacggctgcatcggtcggctgcctcgggtccttctccggcctcgcgcccgtctcgaatctcctctccctcggcgctgagaactcaagctttgagcatcggttgtttggtattgatgcccgtggaaggatagttgcgatgcgacatgggagacgcgttcctaaaccttaacaggcctccggatcaaaggaaagcccctgttccttgg

SEQ ID NO: 18345 - DNA, 386 bp, Zea mays
  Clone ID: LIB84-027-Q1-E1-D5
agacttgttacacttaattgacttgattgtgcaggaccattgtgtttactgaagcagcttagttcatgttcctgtcatgggtatggaacatttcatcagttctgcaaacctttcagcaggtttcacatcgtatggaaatgaagcagcagaggaaatgaaaaaactacgaggtctaagattggaaacactgatggaaacctgccaaaacacagaaagcagagatgtagcgatcaggtgtccaataccatgcaaaagcagcaggcggtatagggaacatgacttgagagctgcacaagatctttctgaattcattgcttcacctccatactttatgggatctccaccacttcgtgcaaccaatcctcttgctcatgatgcacaattct

SEQ ID NO: 18346 - DNA, 381 bp, Zea mays
  Clone ID: LIB84-027-Q1-E1-D6
aggaggaagcctctttttgtgaagaacggtgcaattgttgtttgccgcattcaggtgaataacttgatatgcatagagaagttctctgatttccctcagcttggaaggtttacacttagaactgaaggaaagacggtagctgtaggcaaagttgttgatattccgcctgctggtagcccaacattctgagcttaagtcaattttgaacaggatggataatcatgaagcagtgcgttcgcttaagatacttttttttgggaagtgagattagttgttgaggttagattttttttcagtccatcttgagaatggtctatgcctttatggtttaggctagcaagtcttagattggttgcataaaattacatctctggttacatg

SEQ ID NO: 18347 - DNA, 342 bp, Zea mays
  Clone ID: LIB84-027-Q1-E1-D7
gaccaacattacaaatgctgtttatttttattttacacaaaattccacaacataacaaatatatcaacagttatatagcacaacatattttcacataaaacatctcacacacaatcacataacaatatttaaatttagagtctcatcaattacatcacaaaagtctcatccatagtcaatgaagggatatattagctccaagcaaattgtgttaccataaaattccatgtagagcaaacatcattagcataggatgttttaaacctcgatagatggcatagtcacggagatgtggagatctttgccatcatttatagcttccaacatggtgatgcactggga

SEQ ID NO: 18348 - DNA, 143 bp, Zea mays
  Clone ID: LIB84-027-Q1-E1-D8
agcggacgcgtgggctattagcgtctatagacttcgcagggctatgtatagtagatatgtagattgagaccctgctgagcatgtacgtgcagtatgttcctagtcacttgtgtatcattactagtaatgcagtatccctcgtg

SEQ ID NO: 18349 - DNA, 378 bp, Zea mays
  Clone ID: LIB84-027-Q1-E1-D9
agcatagcacttgttccagctagctatgagagagagctttgtttaggcggcggcaagatgaacaggaagccaggagactgggactgcagggcgtgccagcacctcaacttcagccgtcgggatgcatgccagcgctgcagtgaaccacgtggagttggtgatcgtagcggcggtggtggcgacttgggtgggcgtggtggttcctccttcggcggtggctttggtgctggctctgatgtccgccctggtgactggtactgctcctgcggcgcacacaacttcgccagccgctccaactgcttcaagtgctctgcctacaaggaagacgctgccggcgcctttgatagtgacatgttacgctcacgcggctaagccggc

SEQ ID NO: 18350 - DNA, 405 bp, Zea mays
  Clone ID: LIB84-027-Q1-E1-E10
cgacgacgcgtacgcagcgactcagcgagcgagagcagcacacacgcagctagctaggagcagcagcagagcagcggcgatggcggcctccatgatctcctcgtcagctctggcggtggcgcctcagggcctgccgcccctcggccgccgcgcctcctccttcgccgtcgtctgctccaagaagaagatcaagaccgacaagccctacgggattgggggtggcctgaccgtcgacgtcgacgccaacgggagaaagggcaagggcaagggcgtgtaccagttcgtcgacaagtacggcgcgaacgtcgacggatacagcccaatctacaacgaggatgactggtctcccaccggcgacgtctacgtcggtggaaccactgggcttctgatctgggccgtcaccct

SEQ ID NO: 18351 - DNA, 310 bp, Zea mays
  Clone ID: LIB84-027-Q1-E1-E11
cacgcgtcaggtgatcatcaacagctagtgctagtcccccttccttccatccatccatggcatgcgtcaacaccttcccgagctgccccactgccaaaataacagaggtcaataccaagtccacgggcagcacccatatcctggcaaaggggtcaccatcactagccttccatttccagtgcatggcgtccactttctccgcgggcaacagcctccggcacgagctggacgaaaacgccgaggcgatcatctcgggggcgtagcccgggaactgctccctcctcagctacgacgacttccgctcctacct

SEQ ID NO: 18352 - DNA, 379 bp, Zea mays
  Clone ID: LIB84-027-Q1-E1-E2
cccacgcgtccgagcgactcagcgagcgagagcagcacacactgcacgcagctagctaggagcagcagcagcggcggcgatggcggcctccatgatctcctcgtcagctctggcggtggcgcctcagggcctgccgcccctcggccgccgcgcctcctccttcgccgtcgtctgctccaagaagaagatcaagaccgacaagccctacgggattgggggtggcctgaccgtcgacgtcgacgccaacgggagaaagggcaagggcaagggcgtgtaccagttcgtcgacaagtacggcgcgaacgtcgacggatacagcccaatctacaacgaggatgactggtctcccaccggcgacgtctacgtccgtggaaccact

SEQ ID NO: 18353 - DNA, 374 bp, Zea mays
  Clone ID: LIB84-027-Q1-E1-E6
agacggcaacgtcttcgtcgcggctaccgcggtggtggcgtgcacgggcgccggcgcgctggcgcgcgggagggaggtgcaccggtgggtggagcagagcgggatccagatggacgagaagctggccaccgcggtggtggacatgtactgcaagtgcggctgcgtcgaggaggcgtggcgtgtgttcgaggccctcccgctcgctgccaaggggctcacgacgtggaactgcatgatcggcgggttcgcggtgcacgggcgggggcaggacgctctgaagctgttcggacggatggagagggagggcgtggcgccggacgacgtcacgctggtgaacgtgctcactgcttgcgcgcacgcggggatgctcagcg

SEQ ID NO: 18354 - DNA, 362 bp, Zea mays
  Clone ID: LIB84-027-Q1-E1-E7
agtgtccagcacaagagagagaagaggagtggaggaggtgggagcagcaagaatggcgtgctccaccaatctctgcttctcggcgttgattcctcctcttccagcctcttcttcttctggctcctcccccttcctcacgatgaagcgtgtgtcctctgttccgtcgttgtccaagtggacaatccgatacaagcaattgggacatgcattatatcagagaagccacgttctggcctttgctagtgcagatgcatcacaaggcaaaagaagctcaagtgagaatgttgtgatggttgatccactggaagctaagcgtctagctgctaaacaaatgcaagaaattagggccaaagaaaagctga

SEQ ID NO: 18355 - DNA, 391 bp, Zea mays
  Clone ID: LIB84-027-Q1-E1-E8
agaccgcattgccggcgggccgctcggcgaggtcgtcgacccgctgtaccctggcggcagcttcgaccccctcggcctggccgacgaccccgaggccttcgccgagctcaaggtgaaggagctcaagaacggccgcctcgccatgttttccatgttcggcttcttcgtccaggccatcgtcaccggcaagggcccgctcgagaacctcgctgaccacatcgctgacccagtcaacaacaacgcatgggcctacgccaccaacttcgtccccggcaactaagctcaacggctatgctatgcaacttcattgtctttcggatcggagagggtgtacgtacctggattgattgatgctgcgagatgcatgtgtgtcctttggtttcaacttgca

SEQ ID NO: 18356 - DNA, 351 bp, Zea mays
  Clone ID: LIB84-027-Q1-E1-F1
acccacgcgtccgtgtaaaggaatatattttgaaggctggttgtaacgtggacaagtcttcattccattcactgatggaagggatactgaaaaaagctggtgtggaaaaatcaatcgagtttgctgaaaacatagcatctacgggaattctgctgaatgatttctttttatgcccattgattagacacctctgcaagcacaagaaagctcttgaagcgcatcaactattcaataagtttaaaggtcttggagtttcactaaaaactggttcttataattctcttatccgtggccttgtggatgaaaacctgattgatatcgctgaagacttgttcactgaaatgaaaagac

SEQ ID NO: 18357 - DNA, 398 bp, Zea mays
  Clone ID: LIB84-027-Q1-E1-F2
acaggtgaagcttgctgttgtggtgaaggttatgggcaggaccgggtccaggggtcaggtgacccaggtcagagtgaagttcttggatgaccagaaccgtctcatcatgaggaacgtcaagggccctgttcgtgagggtgacatcctcaccctgctcgagtctgagcgggaggccaggaggctgcgctgaagccctggtggccttggatgtaattctgttaattttgttctatgtttgtcgaacttgccgtgtcccttgcaacatctgctttgagatttactgagcctggattgcagttttattttatgttcctgctggaaagtacacttgccgaaacatagttatcattggttatctataatagctcaatcgacgcgtgcaatctgaaagctttgtt

SEQ ID NO: 18358 - DNA, 382 bp, Zea mays
  Clone ID: LIB84-027-Q1-E1-F3
accatggcgacctccgcggcgctctcgaccgccgcgaagcccacccagctctgccggtcccgcgctgcgctgggcaagccagtgaaggggcttggcctggggatggggcgggagcgcgcaagccagcggagcatcacgtgccaggcggcgagcagcatccccgccgaccgcgtccccgacatggagaagcggaagctgatgaacctcctcctcctgggcgccatatcgctgcccaccgtcggcatggtcgtcccctacggcgccttcttcgtccccgccggctccgggaacggccgcggcgggacctacgccaaggacaagctgggcaacgacatcacggtggacgagttgctcaacacgcacgggtcccaacgaccgcacg

SEQ ID NO: 18359 - DNA, 379 bp, Zea mays
  Clone ID: LIB84-027-Q1-E1-F6
acgtcgagatgcttcgtggctccgccgccctcctccgccgcctcgcccctcgtatctcgggcggtggctgcggaaacaacaatcaacggggcccttcttcctccaatcgcccccttcctcggcgcccgcttcttgtctgccccgactacttcttcaccgccttcttcgtcttcagctgcctgccacgaggaggatgcggaggacagagacctccccgagatctccaatggtgatgcaggtgcccggctcagcatctccgtcgaccgctccgggctctacaaccccacagagcactcgcacgagccgtcgtcggaatccgagctcgtcaagcacatcaagagcatcataaagtttcggagtgggccaatcagcataactg

SEQ ID NO: 18360 - DNA, 384 bp, Zea mays
  Clone ID: LIB84-027-Q1-E1-F7
gtctatctatccttctatccccattcccatcccgagacaggagaaggcaaggatgctgctcctgagctcccccttcgtgtccgtgtcgccgccgccgccgccgctcagctcccatggcgctcgcccggcgctgcggatcgaggcggccaggcagctgacggggcgggtggtgacgaccaaggcggacaagacggtcggggtggaggtggtgcgcctggctccacaccccaagtacaagcgccgggagcgcatcaagaagaagtaccaggcgcacgaccccgacaaccagttcaaggtcggcgacgtcgtcgagctccaaccctcccgtcccatctccaagaccaagcacttcctcgccatcccgctcccgccccgcgacactcg

SEQ ID NO: 18361 - DNA, 395 bp, Zea mays
  Clone ID: LIB84-027-Q1-E1-F8
agcccacgcgtccgaatacaaattcataaagatgcatatatataatatagctccgcctccgatcctcctctctgcgtgcaaaggtatgccatttcagcagtgacgagcatcgtggatacatgcaattcctctgcacatggatggattgggatgtaacttggaactgttaatttttttttactttgatttggatgcatcatgacccccccttcaaaccagctagtgaaatgccattttaggtaaaagtcgacctcctagtatcatattgtcgttgtcttgatccgagtatctcaccaaccagtgaaatgatgttgcgtgccttggcccagatgagtgatgtaaggtcacacaagtcatttatcctagtttgggcgagagaaagccctacttccagc

SEQ ID NO: 18362 - DNA, 375 bp, Zea mays
  Clone ID: LIB84-027-Q1-E1-F9
ttttattttttcgaaaacatgcaagaaaactgatgtctgtcaatagatctaaagtacagtttccagctacagaaatgcataattgcagtaccatcaaaacaattctaagcgactcaatatgtccaaaactctatgggttttcacctgacagtgagctgaacctgatcatatctccagaccagatttattcagcagatgaactgaccatgcacgggcacatccccccatcagagcctgaggtccaagtcgatcttgctctgttcagtctcgaacgctcgctcgtgctccgagtgctgcgctctcagcctgaagctcccaggccacgccgccgaaccgggcgcctcctcgcaagcggcgacggtcgtcccccaggcg

SEQ ID NO: 18363 - DNA, 396 bp, Zea mays
  Clone ID: LIB84-027-Q1-E1-G1
acccacgcgtccgtgtatattaggcccttacttatgggaagtggggctgttcttggtcttgcacctgctcctgagtatacattcattatatttgtctctcctgttggaaactactttaaggaaggtttagcaccaataaatttgatagttgaagacaagttccatcgtgctactcctggtggtactgggggtgtgaagaccataggaaattatgcttcggtgttgatggcacagaaaattgcaaaggaaaagggttattctgatgtcctctacttggacgctgttcacaagaagtaccttgaagaagtttcttcatgcaatgtttttgttgtcaaggacaatgttatttctaccccagcactaaaatgaacaatattacctggtatcacaaggaaa

SEQ ID NO: 18364 - DNA, 306 bp, Zea mays
  Clone ID: LIB84-027-Q1-E1-G10
acgtgttaaacgtgttagtggaatgatggatggtctcactacgtataatatttattagatagcctgagtcgttgttatttttgtggaattcgtggcgggttaataatagtactctggtttactactaaaaaaaaaaaaaaaaaaaaaaaaaaaaaaaaaaaaaaaaaaaaaaaaaaaaaaaaaaaaaaaaaaaaaaaaaaaaaaaaaaaaaaaaaaaaaaaaaaaaaaaaaaaaaaaaggggggccccccaaaaggttcaaaccttaattacccgtcaaagaaaaatcaaaccccttcaaaactgc

SEQ ID NO: 18365 - DNA, 393 bp, Zea mays
  Clone ID: LIB84-027-Q1-E1-G11
aggatcgatctgcccttaacaatgcctggaaatcatggatggaagaacacatagcggccacgggcaaggcgccaccagggaacgttgcaggaaaccacacctgggttggtggtgccccccagcggcccccagacctgcgtctgacgcctggacgccacgtccagctgacggttccgctggagcagctgatagaccggctggtgaaggagaacagggtggtggccttcatcaaaggatcaaggagcgctcctcagtgcgggttctcgcagagggtggtgggtatcctggaagcgcacgccgcggatttcgtgaccgtcgatgtgctcgacgaggagcacaaccacgggctgagagaaaccctcaaggcttacagcagctggccgacgttccctc

SEQ ID NO: 18366 - DNA, 369 bp, Zea mays
  Clone ID: LIB84-027-Q1-E1-G12
aagggagatcgacgtgaatctcatcatcactgactactgcatgccaggcatgacaggatacgatctgctcaagagagtgaaggggtcctcctcgctcaaggacattcctgtggtgatcatgtcgtctgagaatgtgcctgcccggatcagcaggtgcttgcaagacggcgcggaggagttcttcctgaagcccgtgaagctggccgacatgaagaagctcaagtcgcacctgctgaaacggaagcagcccaaggaggcgcaggcgcaggcgcagcagggacaggcggtggagctggagcctgagcagcagctggacccgcgcgcgcagccggggcacgacgcggaggaaaccgcggcagagccgccgcc

SEQ ID NO: 18367 - DNA, 377 bp, Zea mays
  Clone ID: LIB84-027-Q1-E1-G2
gaagagagcagaagcgaagagcagcggcgcaaaggaaagggagccatgctcgcctcgccggcgctcgccggcgcccactccttcgcggcgtccgtgtatggaaacatcctcgtcccctcgcctcccgtccccgcgccggcacgtcgcgcggcgctgtccgtcgtcgccaaggtcaaggtggccactccccaggacgaccgcatcgcccgccacgtccgcctccgcaagaaggtaagtggcaccactgagaggccgaggttgagtgttttccgctcaaacaaacatctgtacgctcaagtcatcgacgacacaaagcaatgtactctggcttcagcttcaaccatgcacaaatctctctccaaggaatttgaatactc

SEQ ID NO: 18368 - DNA, 383 bp, Zea mays
  Clone ID: LIB84-027-Q1-E1-G3
acgccgagctcgacccggagaagaggctgtaccccggcggctcctacttcgacccgctcggcctggcggccgaccctgagaagaaggagcggctgcagctggcggagatcaagcacgcgcggctcgccatggtcgccttcctcggcttcgccgtgcaggccgccgccaccggcaaggggccgctcaacaactgggccacccacctgagcgacccgctccacaccaccatcttcgacacgttcggagggtcctcttaagcccgccattgctccgccccgtccatcgaccggccggaacgtgttcttggattaattaactacgatctctatgagcctggggatggatcaacccgtcgtgcgtggtctcgttttgtgatgagttgg

SEQ ID NO: 18369 - DNA, 306 bp, Zea mays
  Clone ID: LIB84-027-Q1-E1-G4
acccaagcgtccgcccacgcgtccgcggacgcgtgggcggacgcgtgggtgagggcccccaatttgacgaagcattcgctgagaccggtgtgagctcgagtccaccagcaagggaaacatctgaaattgaagaagtcggagactgggacaacgagttgtatgaaagggttcaaagtcatctgggggcatcaacatcaagtgctttgttctggaacactccagggaaggactatggtacagaagaaaacactaacagcacttggtgggcacatgcccctgcatatccgtctggtccccacggtagct

SEQ ID NO: 18370 - DNA, 385 bp, Zea mays
  Clone ID: LIB84-027-Q1-E1-G5
gaagagggaaaaatcgaaatgaaataaataaagaataaagccaaaaaaataagtcgaagatagaagagcccagattcaaaatgaagaaatggaaactcgaaaaggatccttctgattctcaaagaatgaggggcaaggggattgataccgagaaagatttcttcttattataagacgtgatttgatccgcatatgtttggtaaaagaacaatcttctcctttaatcataaatggaaagtgttcaattagaacatgaaaacgtgactcaattggtcttagttagtcttcgggacggagtggaagaagggcggagactctcgaacgaggaaaaggatcccttcgaaagaattgaacgaggagccgtatgaagttaaaatcccaagtt

SEQ ID NO: 18371 - DNA, 388 bp, Zea mays
  Clone ID: LIB84-027-Q1-E1-G6
cccacgcgtccgagctgacggacgactgaaccaccgacagacaacatggccgcctccgcctccaccgtctccggcctcgccggcgcctccctggccagccgcccggcgttctccaccagcttcacgcggggcagccgggtgtcggcgaggaaccccctgatgagcaggaacctggagaggaatggcaggatcacctgcatgacgtttccccgggactggctgcggagggacctgagcgtcatcggcttcgggctcatcggctggatggggccgtccagcgtcccggccatcaacggcaacagcctcacggggctcttcttctccagcatcggccaggagctggcccacttccccacgcccccgcccgtcacctcccagttctggctgt

SEQ ID NO: 18372 - DNA, 386 bp, Zea mays
  Clone ID: LIB84-027-Q1-E1-G7
aactgcggcggcggcgcgcgcggtgtccgtgtcaccagtcccggcgccttcgctcctcagcggccggcgcggcgggtcgcggggcggccgggggtcggtgtcggtgcgcagcacggtgtgggacctcgtgggcggggacctgatgcggccggacctgggcaagtggctggatccacctgcacaagcacaacgcgctggccatctacgcgccgcacgagggcggctacaacggccgctacctgaaccgcctccgctaccagtgctagtacttcctcgagctcaccgcgcaggggctcggcgacgcggacatgacgctcactaaggtccaccccgtctgcacgcctagcctcggaaggtaccccgtggcgtggtagtacttcccggcc

SEQ ID NO: 18373 - DNA, 340 bp, Zea mays
  Clone ID: LIB84-027-Q1-E1-G8
agggaggttggaagctcagttagatgaccaaatgattgcataccgtaaattggtttctacgaaatcagatggttcagagaacgacattgagtctgatatagaaagatcactgaagcagttacagcaagtgaattcgcaaatgcaaacttgggtatcatcaggaggttctgaagttctttctcatactctgactcgtcatatggagattttgcaagaccttactcaggaattctatcggcttcgatcaagtctcagggcaaaacaacagcatacttctctccttgacttgagagattttgacagagcaaaagtttgatgttgaaggagccgtcagactcag

SEQ ID NO: 18374 - DNA, 390 bp, Zea mays
  Clone ID: LIB84-027-Q1-E1-G9
agcccacacatccgggtttatggcatgataagtgacagcgtgaagaaagaactaaaccctttgcttgaattgtgtatacaggatccacaaacttctcagtcaagtattgcaaaaggtaatcttaatggcatgggtcaacagaaccaactcacacattggctgggcatagtgaaaatcctcactagctacttggatgtactaagggaaaatcacgttccctcaattctggtgcataaacttttcactcaaatgttctcacttattgatgttcaattatttaaccgattacttttgcggcgtgagtgctgttcttttagtaacggggaatatatcagagctggactagctgaactaaaacattggtccgacaatgctacaagagagtttgca

SEQ ID NO: 18375 - DNA, 58 bp, Zea mays
  Clone ID: LIB84-027-Q1-E1-H1
agaaaaagcatcggcagcacgtctgaggggactgccaactgcatggacatccagatcg

SEQ ID NO: 18376 - DNA, 375 bp, Zea mays
  Clone ID: LIB84-027-Q1-E1-H10
gacagagacagggacagcgacgatcacatgctatttcaacgagaagtgataccgatagagtgggccctgtgatgcagcaggggttcgaccgtgcagaggctgtgttcacgctcatcagccgctgcatgtgccacacggtgactcagctgattgccgacctgagcgtaaatgcgatggtgcacgagctgggcagcgaccccaggggcaaggacatggtgcacgcgctgctcaatatgctgagatggaaggcgcccgccgtctccgccgtcatcagctgcgggaatctcatctgcggcaccagcaaagtcatgtctctccacctcgccggatagctcgtgcccatgctcacgaatgctagcgccctctgggtctaca

SEQ ID NO: 18377 - DNA, 391 bp, Zea mays
  Clone ID: LIB84-027-Q1-E1-H11
acgcccacgcgtccgcccacgcgtccgcccacgcgtccgagaaaaagagaagatgaggagttgcatgtggagcgtaaaaaggcacagttggttgataccaagaaaatttctattgacaatagtcatgcagctgctgtggatacctctgagctagtagttgaaatgatgcaagtgaaggaagacattgagaaccaagaattagttgtgcagaaaattaatttgaaacttacagatgctttgcaagaagagaataatagaagagcgtcttacaaggacttcattgagtctgtacatgctgaaatggggtctattagcgatgctgagcgtgaattgcagcttgttgaagaaaaaatacctgatgctgagcaagagaaggcccactatgaacgtg

SEQ ID NO: 18378 - DNA, 357 bp, Zea mays
  Clone ID: LIB84-027-Q1-E1-H12
gcaagcagcgagtacatacatactatgcagccaggcagccatggcgcccaccgtgatgatggcctcgtcggccaccgccgtcgctccgttccaggggctcaagtccaccgccagcctccccgtcgcccgccgctcctccagaagcctcggcaacgtcagcaacggcggaaggatccggtgcatgcaggtgtggccggcctacggcaacaagaagttcgagacgctgtcgtacctgccgccgctgtcgacggacgacctgctgaagcaggtggactacctgccgcgcaacggctggataccctgcctcgagttcagcaaggtcggcttcgtgtaccgcgagaactccaactccccgtg

SEQ ID NO: 18379 - DNA, 418 bp, Zea mays
  Clone ID: LIB84-027-Q1-E1-H2
acgcgtccagtcaacactagtcacgttcgtccaccagagacaacaatggccatggagacgtgcttcagagcgtgggcgctgcacgcccccgctggcagcaaggacaggctcctcgtcggcaacctggtgctgccgtcgaagcgggcgctcgcgccgctgtccgtgggccgcgtcgccacgcgccggccgcggcacgtctgccagtccaagaacgcagtggacgaagttgtggtggcggacgagaagaactgggacgggttggtgatggcgtgcgagacgccggtgctggtggagttctgggcgccgtggtgcgggccgtgccggatgatcgcgccggtgatcgacgagctggccaaggactacgccggcaagatcacgtgctgcaacgtgaacacggacgaaagcccaacgtggcgtc

SEQ ID NO: 18380 - DNA, 110 bp, Zea mays
  Clone ID: LIB84-027-Q1-E1-H4
acgcgtccaggcgacttcgtcgaccgcgagggcgcggggaagcacatccaggcgggggccaagaaggtgctcatcacggcgcccggcaagggcgacatccccacctacgt

SEQ ID NO: 18381 - DNA, 380 bp, Zea mays
  Clone ID: LIB84-027-Q1-E1-H5
acccacgcgtccgcgccgcaccagcgccagcccgcgccgtggtcagaaggaggtccttcaccgtgcgcgcctctctccgcaaggccaccggcaccgccgccgtggcaatggctgccagcgccctgcttgccggcggtgccatggcccaggaggtgctgctgggcgcaggcgacggcgggctcgtcttcgagcccagccagttcaccgtcaaggccggcgacaccatcacattcaagaacaacgccggcttcccgcacaacgtcgtcttcgacgaagacgaggtgccgagcggcgtcgacgccaccaagatctcgcaggaggagtacctcaacgcgccaggcgagacctactccgtcaccctcaccgtgccgggaacctac

SEQ ID NO: 18382 - DNA, 385 bp, Zea mays
  Clone ID: LIB84-027-Q1-E1-H6
cggacgcgtgggcggacgcgtgggcaaggctgtcggtaaggttcttcctgaattgaatggcaagctcactggcatgtccttccgggttcccaccgtggatgtgtcagttgttgacctcactgtcagaatcgagaagggggcctcttacgaggaaatcaagaaagctattaaggctgcttctgagggcccactcaagggtattatgggctacgtggaggaggatctggtttccaccgacttcaccggtgacagcaggtcgagcatcttcgacgccaaggccgggattgccctgaacgaccacttcatcaagctcgtctcttggtacgacaacgagtggggctacagcaaccgcgtcgtccacctgatccgccacatgttcaagacc

SEQ ID NO: 18383 - DNA, 337 bp, Zea mays
  Clone ID: LIB84-027-Q1-E1-H7
atttctttatttcatcatctaaagtaaaggttgcagaagatttacagcagactttaaaagattttgtcatctatatcttttcgatcaaaaaaaaagaaaaaaaagaagaaaaaaaaaaagaaaaaaaaaaaaacaaaaaaggaaaaaaaaaaaaaaaaaaaaaaaaaaaaagaaaaggaaaaaaagaagagaaaaaagagagaaaaaaaaggggggggccctcaaaggtgtcaagttggaataagcctgataggaggaggcagagagctcaaaaggggcaccaaaatgcaagtccagggggtgctttttaaaagcgtcggacggggaaaaacccggg

SEQ ID NO: 18384 - DNA, 336 bp, Zea mays
  Clone ID: LIB84-028-Q1-E1-A1
agcggacgcgtggggtggcgaccgccgtggtggccttggtgctgctggcggcggcggcgacctcggaggcggccatcagctgcgggcaggtggcgtcggccatcgcgccctgcatctcctacgcgcgcggccagggctcggggccctccgccggctgctgcagcggcgtcaggagcctcaacaacgccgcccgcaccaccgccgaccgccgcgccgcctgcaactgcctcaagaacgccgccgccggcgtcagcggcctcaacgccggcaacgccgccagcatcccctccaagtgcggcgtcagcatcccctacaccatcagcacctccaacgact

SEQ ID NO: 18385 - DNA, 146 bp, Zea mays
  Clone ID: LIB84-028-Q1-E1-A10
acgagaaatcatcaaagatgcgtatatatatagctccggccgatcctcctctctagctgcatggtatgtaggtggtgtggtccttgtttcatttcactccagcggtgatcagcgccgtgtataaatgtaattcctctgctttgcac

SEQ ID NO: 18386 - DNA, 387 bp, Zea mays
  Clone ID: LIB84-028-Q1-E1-A12
acggtctcccggcgtcctaattccaggaactttcgtcgcgtcaggtgatgcttttagcaactacaagcatagaacaatgttgatgcactatgatgtggatagaagtgaggaccggcaacgtgaggaggttcagtcagcatacacacgggacactgacattggtgaggaaatgatcataagtagcgaagagcagaatgatgaaaatgaatggagctgggtgaaccaagatagagatggtggtcctcctgctgaatcggtttcttcacttcatatgacacaccaagtccttgaagatgagataccagaattatcagaacttggcaaacaacttgaggcggacgaatccacttctggtaacaaagaccaggatgtgattgtcttgccgta

SEQ ID NO: 18387 - DNA, 342 bp, Zea mays
  Clone ID: LIB84-028-Q1-E1-A2
acggagaaagataggagtcaattaatttgcctgttctgcttgctgctgaccttgtgagtgagccgccggtcttccccttcctcgccgaggggaaataataaggcagccacagccagggccgccccgaggaagaagatgagcggaggaggcgtggacggagctccggtcgccgagttccggcagacggtgacgcacggcggccggttcctgcagtacaacatcttcggcaacctgttcgagatcacgcacaagtaccagccccccatcatgcccatcggccgcggcgcctacgggatcgtctgctcggtgatgaactccgagacgaaagaaatggtggccatc

SEQ ID NO: 18388 - DNA, 325 bp, Zea mays
  Clone ID: LIB84-028-Q1-E1-A3
acgtgatgcagcactgattttcatggttgcagttggcccaacaatggttgttatagcttcaatgttcattgtaagacctgttggaggccacagacaagtgcgaccttctgatggcacaagtttcacatttgtatacagtgtctgcttgctgttagcctcttatcttatgggcgtcatgttattggaagaccttgttgacttaagccagtcagtgactgtcgtgttgaccgtgattctaatcatgtttctattagttccaatagtcattccagttctactcagcttcttttcggatgatgacgagactttgtatgcactattgttg

SEQ ID NO: 18389 - DNA, 382 bp, Zea mays
  Clone ID: LIB84-028-Q1-E1-A4
atcattgacaaggagggagtgattcagcactctaccattaataaccttgccattggtcgcagtgtggacgagaccatgaggacccttcaggcattgcagtacgtccaggagaacccagacgaggtctgcccggccggttggaagccaggggagaggtccatgaagcccgaccccaagggaagcaaagagtacttcgcggccgtctagactcgccgtctttgacaagctttgctacgtttttgtcatggtgcccgctaagccccccggcagtaggttggagttttgcggagctcgcgtttttacaaatctcggtgctctgaacccgacgtagtaccccctttggcggtgtgcaccccgattgagtgcggttctttgccacctt

SEQ ID NO: 18390 - DNA, 362 bp, Zea mays
  Clone ID: LIB84-028-Q1-E1-A5
acggcacaggcgaagcagcagcagcgagaggccaccacaaacatggcgaccacggcgtttctacccccggccaagctgccgctgcaggggcgtcggttcgctagccccaaaacggcgggacgtatcagtgtcagggtccctccggcgcgagcgcagcaagagcagcaggtgaaggaggaggaggccgaggcggcgagcgtgccgccgccgcaggccgcggagaaggaggcgaggaagggggacgcgcagtccctgccgcggcagcctttggcggagagcaagaacatgagccgcgagtacggcgggcagtggctgagcagcaccacgcggcacgtccgcatctaacctgcgtacatccaccc

SEQ ID NO: 18391 - DNA, 352 bp, Zea mays
  Clone ID: LIB84-028-Q1-E1-A6
acgcccacgcgtccgcccacgcgtccgcccacgcgtccggacgacgatcacacacgcagaagatcgagttcgttcgatcgtgaccgtgacgcaggaagctataagctaaccaagacaggaataataagggcggagtcgacggtggcgagcctctctgtcccggtgacgacgacgaccttcgcggcggcgggcggcaggcgacgtgctgatcgtcgtcccgaggagggcgggcgccaagcgcgtcgtcaggttccccgcggcggcgcgccgcggctgcgggcggttggtcaccgtgcggtccaccgggccggccacgccgcccgagatctccgacaaggtgtcggagagcatc

SEQ ID NO: 18392 - DNA, 278 bp, Zea mays
  Clone ID: LIB84-028-Q1-E1-A7
acgacagataagaatgctagacaatattctgagaagactcctaacaggcatgaggagatgcgtgagctgttccagaatgatatgagtgaatggaaacagggacgctcctcgaagaaaaacaacaatttcgcgcacaaaacaccaaacgcttttaacagcacagcaagatataagcgccgcaaacagaatactcggccatccccggatttatttacattctcgtctcagttttgactgaccgaccttgacgaaattctctgggatccagatgtttccag

SEQ ID NO: 18393 - DNA, 363 bp, Zea mays
  Clone ID: LIB84-028-Q1-E1-A8
acgcgcatccgccgccagcaggtgccaccgccatctctgctctctctctctctctcaagcaacgcccgccatggcgaccatagccacgatggccctgctgaagcccgccaggatcgtggcgcggtcggcgccgccgtccaccagcggcagcgtctcgctgcgcgtcccggcgcgggccaagaaggccgcggtgtccgcgtccgtgtcgtccgcgctggcgggcgccttcttctcggcgctggcgtcgtcggacgcggcgctggcggcgcagcgcgtggcggacgtggcggcggcggccgactccgggagcgacaaccgcgggcagctgctgctcttcgtggtggcgcccgccatcgggtgggt

SEQ ID NO: 18394 - DNA, 388 bp, Zea mays
  Clone ID: LIB84-028-Q1-E1-A9
ttacgcgccacgcgtccgtgagtatgagctcaatcttccaagttcaaacaagggacttgatgttggaagggtgtattttgtgatcctcgagatgtcccctgttacatatattgattcgagtgctgttcaagctcttaaagacttgcaccaagaatacaaagcacgccatattcagattgccatagctaacccgaaccggcaagtgtaccttctgttgtcaagatcgggcatcattgacttggtaggagctgggtggtgctttgtgcgagtgcatgacgccgtgcaagtgtgcctacagcacgtgcagaattcatcttcaaatgcgttgaagctacccgtgcaggcatcaggcgtgttgaccgattctgtttcgactcctaaaccagag

SEQ ID NO: 18395 - DNA, 327 bp, Zea mays
  Clone ID: LIB84-028-Q1-E1-B1
atattacagacgcactttattcataagtttccttaatgactactacaagcgatcgaccccaccaaggccacaactctcacactggtttatgatacaataatactggtacatggttacaaaaaaatgcacaacccccgcagctccatgtatatcacaagccggcagagcttatgcatatgaagctgcacatgcatgcttatgtatatgtttgtgttatatatggatgtatatataacttgaccgtacgtgtacatatatgatgtatatagtttagtgacgatacatcatatatatacagtagagtagcagtacatatgcagatgatga

SEQ ID NO: 18396 - DNA, 356 bp, Zea mays
  Clone ID: LIB84-028-Q1-E1-B10
ggaccgaacaaatacgatatcggttatactagtataaactgggtctgacacaatttaaaataagatacattcatctactgctcgaacacctgatcgcactgccatagacaatttattagagaatcaaatcttcatcatttttcgtggacttgaattctctagttagccacatgttaaccgtgacagtattcgacatccacacccgtctcgcgtgctatgaacttaccgtgaccacttgttggtcaggtgacggcttctgagcgcgacgagaaggatgttattcggcgagtgcagcttggacgaagaacagacagaacggtccgcgcgaagatgtttgacggcggtgtgcttccgcg

SEQ ID NO: 18397 - DNA, 367 bp, Zea mays
  Clone ID: LIB84-028-Q1-E1-B11
acgggccagcatcggcgctgggttcatctacccgctcgtgggcaccatgagcacgatgcctggccttcccaccagaccctgcttctaccagatcgacgtcgacactgccaccgggaaggtcatggggctgtcatgaattgaagtccctgatggtatcattcagagaacgtaaattcggggcattcctggatcgagttaaataagagccgttcctggcatcctgcaagttcagtggcgcttcctttttttacttgattttgtaaaccggagactgtaaatgtgcttgaaccgtgcttttagacccatgcctcaaatcctgcatccaataagtgtctttgaacagcctgaggctgctgagactgttgac

SEQ ID NO: 18398 - DNA, 339 bp, Zea mays
  unsure (1)..(339): unsure at all n locations; Clone ID: LIB84-028-Q1-E1-B4
cggcaaaaacttcccggcccttctccctctcctccctcggcgcctcnctcgcttcccccacccgatttcacacgtctctctcgctccgagccctctccccacgtgctcgtctctctgccgccctccctttcgcctccccactcgtttcaggcgggtacgggacctgggcggcgacttcaatctcgtccgcgggaaggttgagacggcgggggctggaggtggtgtgcgaggccacgaccgggcggcggccggactcggttaagaagagggagcgccagaacgacaagcaccgcatccgcaatcacgcgcgcaaggccgagatgcgcactaagatgaaaa

SEQ ID NO: 18399 - DNA, 353 bp, Zea mays
  Clone ID: LIB84-028-Q1-E1-B6
acgcccacgcgtccgaaccatctaccagcgactcagcgagcgagagcagcacacactgcacgcagctagctaggagcagcagcagcggcggcgatggcggcctccatgatctcctcgtcagctctggcggtggcgcctcagggcctgccgcccctcggccgccgcgcctcctccttcgccgtcgtctgctccaagaagaagatcaagaccgacaagccctacgggattgggggtggcctgaccgtcgacgtcgacgccaacgggagaaagggcaagggcaagggcgtgtaccagttcgtcgacaagtacggcgcgaacgtcgacggatacagcccaatctacaacgaggatga

SEQ ID NO: 18400 - DNA, 359 bp, Zea mays
  Clone ID: LIB84-028-Q1-E1-B7
acgcatcatgacattaatggagggtgatgtgatattaacaggtactcctgagggtgtgggtcctgtcagagtaggtcagaagattacagctggtataactgacctaattgatgttgagttcgatgttcagaggcgaaatcggtcattttccacatgatgcaataagcaagaaagtaatggtgaatacaaagtggcagtactcgtcctcgaccttgaatcgcattactggacctgcagccattgcagatagctcttgagcctttccttgatttaatttacctgggttttgagagactatctatgaatatgctaactcgttcgtgaagtatctttttgtcccaaaaaaaaacaaacaaaaa

SEQ ID NO: 18401 - DNA, 373 bp, Zea mays
  Clone ID: LIB84-028-Q1-E1-B9
acgggtgctctcccggcagcaccacgacgacgaggtccctgagggatcctcgtcggcgtcgagggacaacagccatagcggcggtcgccgcgggcagcggttcgcgccgcgattcgatggcctgcgcttcatcgagacgctcgtcacggcgcaccgctgaagcgacggacccgcgatccgcctggctgcctatgctccggtggtaatctccccgccgccatgattcggcgattcgttgttgctggtggcgcttaggccaccgagttttgttagaacaacaatttcaggcttccccttttcatttggtgctgtgctgttcgtcctcttgttgatgtccgtggtccgtggacattcattcccctttttttagcct

SEQ ID NO: 18402 - DNA, 313 bp, Zea mays
  Clone ID: LIB84-028-Q1-E1-C1
acgcccacgagtccgcggacgcgtgggcggacgcgtgggccgacgcgtgggctgcatattagtgcataccgacaaggaaatgaaagaacactgactgggaaacatgacactgcgagcatcggaacgttctcatggggtgtggcaaaccgcggctgctctatccgtgtggggcgagataccgacgcaaaagggaaaggttacctgcaagaccgtcggccggcatcaaacatggacccgtacactgtgactgggctactggccgagaccacgatcctctggcagccatccctcgaagcggatgctcttgccgcca

SEQ ID NO: 18403 - DNA, 385 bp, Zea mays
  Clone ID: LIB84-028-Q1-E1-C10
acgatgagctcaagctcaaggagatcaagaacggcaggctcgccatgctcgccatcctcggttacttcatccaggggctcgtcaccggcgttggcccgttccagaacctgctcgaccacctcgccgaccccgtcaacaacaacgtgctcaccagcctcaagttccactagaacgttggtgcatcagcatacctgctgccgccgccgccagttgtttgctgtggaaagctagatgcatgcgtgttgtaaaggaacctgaagcgttgcatcggtcatgattcatgcatggccagcctgctgcctgtaacaacaaactagtattgatcttattgagaccgaaaaaaacagaagggggtatgcgcaccggcagaaaaaaagggcggccg

SEQ ID NO: 18404 - DNA, 140 bp, Zea mays
  Clone ID: LIB84-028-Q1-E1-C11
acgcggacgcgtgggctttccaagaaatgagccttcattccctgccactttcatagtttctttcgctgttccacactgacatctatgatttttggagcaaactctgatctgttttgactagtttacacgtttgtgtgtgg

SEQ ID NO: 18405 - DNA, 388 bp, Zea mays
  Clone ID: LIB84-028-Q1-E1-C12
acgaggcatttgctgatgcgtttgctgttcttgagaatgagctactgcagttcagttcagaatgtagcatgcctgtatcttcattcaatatactaaagaaaataatcccaagtattgattctgatgagctgtagctataaaaaagaggtacgattccacagaatacaattgatgacagggtggaatgacctgtgctgccttctagacacactgatgtctatgcagctgctcagaagcctcagtgtggcaagtttgatacctctggaatagaccaaaaaatagaccggcaagatggcaatattcaaacgtgagctcttgtgtgttcatgcaatggcacatgatgccttgctccctgatcgagcttcttgatgttcagatctctgactga

SEQ ID NO: 18406 - DNA, 299 bp, Zea mays
  Clone ID: LIB84-028-Q1-E1-C2
aggaggtcatgtggggttgaactgagccgagacacctacaacaccctgatagctgcgtacggacggtgtggctccaggactaatgccttcaagatgtacaacgagatgaccagcgctggattcaccccctgcatcaccacgtacaacgcgttgctgaacgtgctgtcgcggcagggcgactggtccaccgcccagtcgatcgtaagcaaaatgaggaccaaggggttcaagccgaacgagcagtcgtattcgctgctgctccagtgctacgctaaggggggcaacctggcagggatcac

SEQ ID NO: 18407 - DNA, 361 bp, Zea mays
  Clone ID: LIB84-028-Q1-E1-C3
aattcaaggctcgacggacgcgtaaggcgtgcgtggacgcgctcaacggcctcgtgcacgccgtcatcgggaccaaggccagcgacacctgctgcccgctgctctccggcgtggccgacctcgacgccgcgctctgcctctgcaccaccatcaaggccaaggcgctcagcgtcagcctcgtgctccccgtcgccatctcggtgctcgttaacgagtgcggcaagcatgtgccctccagcttccagtgcccgtaatcacatcagctgcatatatgtgctactatgatgtatcaccaccactaatctatatccgcatgcatgcatcaatgcatgggtgattaacggtttaatacccgtccaag

SEQ ID NO: 18408 - DNA, 325 bp, Zea mays
  Clone ID: LIB84-028-Q1-E1-C4
acggggccgccacgcaactcctccgcgggagcctccctcctgcccgcttcgccgctgccgtctcgcctctcacatacagcagcagccgccaactctgcagtacccccatcgccaacgattcctccgccgcaggaccgtgggacgaggccgagacggagatcctccgcgacgtcgagcccatcgtgaatatcgtcaaggacatcatccactcccgcaggtataaaaatggtgaatttttaagcccagatgatgaaaaggttgtaagagaaaagcttctttctcatcatcctcgtgcagaagaaaagattggttgtgggcttgatgg

SEQ ID NO: 18409 - DNA, 385 bp, Zea mays
  Clone ID: LIB84-028-Q1-E1-C5
acgaagaagctagcgcttatagcttgtcagccatggccaccgccgccgcgtctagcctcctcaagtcctccttcgcgggctcccggctcccggccgccacgcggaccacaccggcgtccctcgtggtggccaccggcccgcgcggcgccggcgcggggcccatctgcgcgtccatgtccatgtcctcccccaacccgccctacgacctgacgtccttccggttcagccccatcaaggagtccatcgtgtcccgcgagatgacccgtcgctacatgacggacatgatcacctacgccgacaccgacgtcgtcatcgtgggcgccggctccgccgggctgtcctgcgccttacagctccccaaagaaccccgccttgagcatcgcca

SEQ ID NO: 18410 - DNA, 367 bp, Zea mays
  Clone ID: LIB84-028-Q1-E1-C6
acgggatattattgctatcttgggtatggatgagctcagtgaggatgacaagctgacagtcgcccgtgcaagaaagattcagcgtttcctgagccagcctttccatgtcgctgaagttttcacgggtgctccaggaaagtatgtggagctgaaggaaagcgtgaagagtttccagggtgttttggatgggaagtatgatgacctccctgagcagtcattctacatggttggtggcattgaggaagtcattgctaaggctgagaaaattgccaaggagtctgcttcataaggaggcttcttgcttgttcaaccctgtagaagttccatttttggattttaagcgtttagttatgcctttcccagttag

SEQ ID NO: 18411 - DNA, 347 bp, Zea mays
  Clone ID: LIB84-028-Q1-E1-C7
acgcggacgcgtgggcggacgcgtgggcggacgcgtgggcggacgcgtggggaaaaattaaccggccagccctggagctgcttctcggctcttccaacatcccctgcttgctaccgttcagttcagtcttcagttatccgagtgaccgtggatcagccatgcctgcgcttctagtgaacaccgtctcggtctcccccgccgcctcaaggctaggctcctcgcggcccgccacggcacggcgagcagcaagcgctcgccacggccacaggtgccgagccgaagcatccggcagctcgtgggtgtcggactacgacctgtacgagctgctgggcgtggagccgtcctcg

SEQ ID NO: 18412 - DNA, 389 bp, Zea mays
  Clone ID: LIB84-028-Q1-E1-C9
acgcccacgcgtccgcccacgcgtccgcggacgcgtgggaggcgacatatcgagcaagtaaaggtggcactgcccgttgtacttaaagttatgcatgctactgtatcagaatgtgttgaggaacatggaagtgctgctgttgatcttttcaatgcagcacatggtgttggcaaggccattcaagaaatgtgcatatcaatggtttgttaatctaagtaactatgtgagctgtttaatgttgaaacttattttaccattttgtttatcatttctatgttctgattgattttgcattattgttctgtctactgaaagttcaacaaaaacaaagatctctgtgcaattcttggtttatactcccttcagaatatagctcttgtatcacgaag

SEQ ID NO: 18413 - DNA, 358 bp, Zea mays
  Clone ID: LIB84-028-Q1-E1-D1
acgcggacgagtgggcggacgcgtgggagcatcgctggctcatctccacgctgtgctcggtgctcaagcgcttgttccttagctctggccacaccagtctcatctccctactactcgtcgttcgacccatgcattccagtcgttacctggccgtgcgggtgcagtgcaggggcggccatgggtgcccagccgaccactaccgccttgcactcgtgctggttctccgcgtccttgctgtggagcctcagttgccgtgcctctctgctcgcccatggcgctccggccaacctcgccgaccctgtgcgtgcctcaacgccgtcgcacgccctgcttcctggtcaacgattttccctgggcg

SEQ ID NO: 18414 - DNA, 336 bp, Zea mays
  Clone ID: LIB84-028-Q1-E1-D10
acgcctgactggcaagtgagataacagaaggagcggcggctacagctttcggttgggggcatacaccgtcaatggatcagcatgtcctccatttagatcgacacagaataagctgctgcaaactagagccattatgtgacaccatgtcacgtgtgtttgatgaactccttctatctgcccctgccaagggagagaagagaatagacatattagtgtgtgtagattagatgtgcatggcatccatggaaatggtgaaggatgaaccaggtgcccataaccgtgatgtacgctggcggtgccgtatcctgttcttgatcagcttgacagcgacgggga

SEQ ID NO: 18415 - DNA, 332 bp, Zea mays
  Clone ID: LIB84-028-Q1-E1-D11
acgcccacgcgtccgcttatggtctgtaccacatgtttttgctgctacgcaagtaaaaaactccacgtctgtcaatgttagttttacaacatcgtctacggacaaacccccccccccccccccccgctatttgattgttgctaagccttcgtacgacgtgtaaatggtttggtacaatgagtgctgcgactacgattgagcacccctctacctagtttgcaaaaaaacagtgtcccatggactgtctgttgtccctctatataaatgtccaatgaagcttgctaaaaacagaaagtagaataacacaggtcatgataaaataaagggcggcc

SEQ ID NO: 18416 - DNA, 383 bp, Zea mays
  Clone ID: LIB84-028-Q1-E1-D12
acgcggacgcgtgggcggacgcgtgggttccagaagcgcaagactctaaaggccgtcgccttcccattcttcctcgccgcgggggtcgcctgagatcacataaacaatggtgaaggctgttgctgtgcttggtagcagcgatggtgtcaagggcaccatctttttcacccaagagggagatggccctaccgctgtcaccggaagtgtctctggcctcaagcctggcctccatgggttccatgtacatgcacttggtgacaccaccaatggatgcatgtcaactggaccacactacaatcctgcgagcaaggagcatggggcaccagaagatgagaaccgccatgctggtgatcttggaaacgtgacagctggagcagatggtg

SEQ ID NO: 18417 - DNA, 228 bp, Zea mays
  Clone ID: LIB84-028-Q1-E1-D2
aattcaaggctcgacgcacccgtacgcgcctaatagctaatacccaacaaacagcacgaaacacttcatccaccagcgtttgtactcgtgcatggccttcgttcgccatggatgcatgctctgtactcttctacaagcaaattctgctacatggcgcctagccaacgttgtgtacttgtgttgccattggttatcagtacaacgctacggagcccataaatcttcact

SEQ ID NO: 18418 - DNA, 311 bp, Zea mays
  Clone ID: LIB84-028-Q1-E1-D3
agcccacgagtccgcccacgcgtccgcacactcctcgccatcacataaaaccagtgcaagcagaagcagcgcaatggcgagcagcaccatggccctctcctccacagccttcgccggcaaggcagtgaacgtgccgtcgtctctcttcggcgatgcccgcgtgacgatgcgcaagacggcggcgaaggcaaagccggcggcgagctccggcagcccgtggtacggccccgaccgcgtgctctacctgggcccgctgtccggcgcgcccccgatctagctgacgggcgagttcccgggcgactaccgctggg

SEQ ID NO: 18419 - DNA, 314 bp, Zea mays
  Clone ID: LIB84-028-Q1-E1-D4
acgcttctcctcgctcctcgccaccgtggaggcggagctggccaagggcggcaaggccgagttcaacaagctcaacgacgtcacctccttcgacttcatcggcgaggcctacttcggcgtgcgcccctcggcgaccgagctcggcaagggcgggccgagcaaggcggccaagtggctcatctggcagctccacccgctggtcacgctcggcctccccatggtcctggaggagccgctgctccacacgttccacctcccgcctttcctcgtcaagggcgactacagggcgctgtacaagtacttctccacggtgg

SEQ ID NO: 18420 - DNA, 338 bp, Zea mays
  Clone ID: LIB84-028-Q1-E1-D6
acgggcgactttgtcattaaaaaggtgttactgaatgatgatgcaaattatggttacaatgctgccaagaactgctatgaggacttgatggctgctggaatactggacgcaacaaaggttgtgaggtgttgcattgagcatgctgctgtagttgctaagtcctttctcacctctgatgtggtgattgttgaggcaaaagaaggcaaacctattcgaataagacccccaatgcctcctaggcacttaattcccccaatgcctgcttcaatttcaggtattcgagtgtagcagtcgtcctttccaccaagaatcagcctcaacacaacaagactacgggg

SEQ ID NO: 18421 - DNA, 378 bp, Zea mays
  Clone ID: LIB84-028-Q1-E1-D7
acgcccacgcgtccgcccacgcgtccggcggcggcggggccacacgtgggcaggggtggggaagacggcccaggcggcggcggcgcacgccgcgctcttctgcttcactctcctcctcgcgctcagggtcgacggacgcaccgcatactcctggtggataatattcagtccactatggctctttcatggtattgttgcacgcggaaggttttcaatgcctgccccttctttgcctcatggccgtcattgggcaccatgtcattcgattgttgcggcgcctttactaattgcgttcgagctgcttctttgtatatatcttgaaagcataagagttagaaatcatccatctgttgatctgaagattgtgttccttcccct

SEQ ID NO: 18422 - DNA, 347 bp, Zea mays
  Clone ID: LIB84-028-Q1-E1-D8
acgcccacgcgtccgcccacgcgtccgcccttgcccacttctacagcccctctgctgcagcaagaaggaaagaagctagcgcttatagcttgtcagccatggccaccgccgccgcgtctagcctcctcaagtcctccttcgcgggctcccggctcccggccgccacgcggaccacaccggcgtccctcgtggtggccaccggcccgcgcggcgccggcgcggggcccatctgcgcgtccatgtccatgtcctcctccaacccgccctacgacctgacgtccttccggttcagctccatcaaggagtccatcgtgtcccgcgagatgacccgtctctagatgacggac

SEQ ID NO: 18423 - DNA, 385 bp, Zea mays
  Clone ID: LIB84-028-Q1-E1-D9
acggccgctggaggcacagacgacaaggcatccgccccggatcgagcccgacccctcttctcgtctcgtctctgcgctgggaacgccggctgccatggctcagcagaagaacgcgcacgtgcccaagttcggcaactgggacagcgacggcaacgtgccgtacacgctcttcttcgagaacgcgcgcaagggcaagggagccggagccgccggcggcggcaggatgatcaaccccaacgaccccgccgagaacccggaggccttctccgtggccgcgccgtcgccgccgccgggccgccacgagcgccgccccagcgacgcgccgccgccgccgatgtcgcccaacccctactacgcagccgggtcgccgtaccaccgccacgcc

SEQ ID NO: 18424 - DNA, 375 bp, Zea mays
  Clone ID: LIB84-028-Q1-E1-E1
agcaagctattgctgatcacttcaagatggcgctggactgcttcttcgctgtatggtttgttgtgggaaatgtgtgggtgtttggtggacattcttccgcccatgacgcacccaacctgtacaggttgtgcatagccttcctcactttcagctgcattggctatgcgatgcccttcatcctctgcgcgctgatatgctgctgcttaccctgcataatctccctgatgggcttccgggaagatctggacgaaaacagaggtgctacttcggatgcgatcaacgccctgggcacatacaggttcatgtcaaagaagcctcgtaacggggaggcaaaccaaagttgccgtggagtcctttgccctggaacggaaaagg

SEQ ID NO: 18425 - DNA, 386 bp, Zea mays
  Clone ID: LIB84-028-Q1-E1-E10
acgcggacgcgtgggccgcttcttctccgtcgcgccggcgccggtcggggcgaaagggctccgagcggcggcctccgccgttgaggtgggcggcgtaaagatcgcgcgcgaggatgttgtgaaagaagatgacctaacaaacaacgtgccagacactatctttgcgaagattggcctgcagctgcacaggagggataaccatccccttgggattctgaagaacacaatttatgattactttgacaagaacttcactggacagtttgacaagtttgatgacctttgcccccttgtttctgtcaagcagaattttgatgatgtcttggtcccttctgatcatgtaagccggagttacaatgacacatattatgttgatgatcaaacag

SEQ ID NO: 18426 - DNA, 388 bp, Zea mays
  Clone ID: LIB84-028-Q1-E1-E11
acgcccacgcgtccgctccactatctgaacaaggaggacaggctgcttcgctggctggtcgtgaagcacagagacacggtatacgggttggagttcttgaacgcggatggcgggagggacgagctgagaagtttcagccatggtcacacgaagggcgactacgatattgaaattgactccgatgacgaagactccgacgactccgacgacgaagagtacgcaatcgaggaggaagaggaagaggaggcggcgaacgatgaggagaagaagtagaactgtttggccaggtttctgcagtctcatctgtattggcagatgcgcgttttcttagaaatcaaatgttctctttgtaacatctgcgactttttataaaggctgtagggtatgg

SEQ ID NO: 18427 - DNA, 390 bp, Zea mays
  Clone ID: LIB84-028-Q1-E1-E12
acgcccacgcgtccgggccggcaccgcctccggcggccggtgagaggagcgacttcaccaaggcacaagaggagccggtcaagaagaggaagatcaagtgcgaggtgaaggtggaggagcaaggagctggcttcggcgattacgacctcggccacggcgacctgtggatggatctcaacccgggagggttcctgagcttcttggaggaggagggcgtgttccagggcctggctgctgctgctgaccacgacttcttgcagccctttggctcgtccaggatggatttggttggtgaaatgcacgcgtcttgacaatggagaagcaagtagaagcaagtgtgcttatatttcagacagtggagactggagaagcaagtgtaagcaacaccag

SEQ ID NO: 18428 - DNA, 337 bp, Zea mays
  Clone ID: LIB84-028-Q1-E1-E3
aattcaaggctcgaccgacccgtaagctccgaactagacagcctgggagaggagtcctacaaggacagcactctgatcatgcagctcctgcgtgacaacttgaccctatggacttccgacaccaacgaggacgccggagatgagatcaaggaagcagctgctgcccccaaagaatccgcccccgagggccagtaagacggatccgatctcccgacctgatgcgtgtctgctgatgtcagggagtttaccaagactgtgccgttcttgatttctgatagcttatcttctagtacacctcgtgttgttctcttcgtcacggcgccggtgactgttcgcc

SEQ ID NO: 18429 - DNA, 280 bp, Zea mays
  Clone ID: LIB84-028-Q1-E1-E4
acgcggctaggtacgccttaggaattcaagactcgaccgacccgtacgcggacgagtgggctaaattcagatcctgaagatcaagaaccacagacattcaagacagctccagaagaaacgcgagatcagttggctgacgcactacatcaaaggtgtcgcgcaatggctgagagtgacacactgcagctccgatgaatcccgcgacgtatggccactagacccgctcgagtcgcccgacccgaagcgtgcccgctgaggtcagggcgtttacgagcactgt

SEQ ID NO: 18430 - DNA, 349 bp, Zea mays
  Clone ID: LIB84-028-Q1-E1-E5
acggcgagcgagagcagcacacactgcacgcagctagctaggagcagcagcagcggcggcgatggcggcctccatgatctcctcgtcagctctggcggtggcgcctcagggcctgccgcccctcggccgccgcgcctcctccttcgccgtcgtctgctccaagaagaagatcaagaccgacaagccctacgggattgggggtggcctgaccgtcgacgtcgacgccaacgggagaaagggcaagggcaagggcgtgtaccagttcgtcgacggatacagcccaatctacaacgaggatgactggtctcccatcggcgacgtctacgtcggttgaaacaatgggcctctg

SEQ ID NO: 18431 - DNA, 355 bp, Zea mays
  Clone ID: LIB84-028-Q1-E1-E7
acgcccacgcgtccgcggacgcgtgggagctaataatgtggctgctaacgcaagtgtgaaccagggaaatccttcttccactggtgatggtcttcttgactttgatatgtacctttctgagattcaaagtacccagcctgcaaaatgtgatctggagcagtacttggaggaatccctcactccacgtatccaagagtttgatatccttaattggtggaagcttaacacactcaagtttccaaccctgtcgaagatggcccgggatatcttggccatcccaatgtctatggttagcagtggcagctccatattctctgctggaactgggaaccgcatgctcgatgactacagaagc

SEQ ID NO: 18432 - DNA, 329 bp, Zea mays
  Clone ID: LIB84-028-Q1-E1-E8
acggaagtttgagtcaggtgtacaccgtgttcagcgtgttcccttgacagaggctatgggtcgtgttcatacgtcaacagcaactgtagctattatgccagaggctgatgaagttgatgtggttattgatccgaaagatattgagcttaaaacagcacgatctggtggagctggagggcagaatgttaacaaggtggagacggctgttgatcgtattcacaagccgacaggaatacggatattctgtacggaagagagatcacagctacagaacagagagcgggcatttcaattgttgagaacaacactttacgagataaaattaaggg

SEQ ID NO: 18433 - DNA, 370 bp, Zea mays
  Clone ID: LIB84-028-Q1-E1-F1
aattcaaggctcgaccgacccgtccgcggacgagtggggcatgttcttggcgggaaaagttgaagaaacacccagacctctgaaggatgtcatacttctttcatatgagatcatccacaaaaaggatcctgctgcagttcaacgaataaaacagaaggaagtatatgaacaacaaaaggaacttattttactcggggaacgtgttgtgcttgtgacacttggttttgatttgaatgtgaaccatccttacaagcccttggttgaagcaataaaaatattcaaggttgctcaaaatgcacttgctcaagttgcctggaattttgtcaatgatgggctccgcacttcactttgcctgcaatttaaaccgcac

SEQ ID NO: 18434 - DNA, 381 bp, Zea mays
  Clone ID: LIB84-028-Q1-E1-F10
acgctttcttagcaagatgtttttatctctgtgctatagctcattagaaattttatcttaaaaatattattctgatttgaactcaagaatagggagaaattgtgaattgtgaaatataatgcaacatacactgaaacatattagagtcgattaggctagagtatgacatgttttccctttcaagaatggatacagaatgactcatatgaatgaagacagtgcttgttttgtagaagtctaaatggttacctatgtggcatctgattttgggttctagacatatttccgttaatatggagctatatatgaagatgtgaaatttagtttagttgttttatgtttcctgtctgttgagttctagtcgagtccaccccacagcat

SEQ ID NO: 18435 - DNA, 387 bp, Zea mays
  Clone ID: LIB84-028-Q1-E1-F11
acgcacctgtggcgcatactctcgtgtcccaaaaccaaacacggcggtgctggtgcgcgcgcagctagcagttgagtgctcgcccttgtcgtcagtcgagtcgagcgatggagaagacgacggtcgtgctgtacccgggcgcgggcgtcggccatctcgcgccgatgctcgagctagccaaggcgttgctccgccacgcaggtgaccaggtggacgtcgccatcgtggtcgtcgagccgcccgtctacgcggacggcttcgccgccacggtcgcgcgcgccaaggcctccaacgcctccgtcgcctgccacgtgctacccccgccggcctccgacggcggcgccgagcctgacgaccccctgacccgactgctccgcttcctccgcg

SEQ ID NO: 18436 - DNA, 389 bp, Zea mays
  Clone ID: LIB84-028-Q1-E1-F12
acggtcaacaccaagctatttgaggtgaatggcaagaggcaggctctcgttttatttgagactgaagaggcagcgaccgaggccctcgtgtcaaagcatgccagcacacttgagggtaacacgatccggatctctttctcccagatgcagagtatataagccacctcaagggaaagctcatgccgccctcgcttgccacccggcgagcactttttaggaagcatttcagactaagatgtgaatcctctgcgccattctccaagatatgctgtctgagctgtacctccccctgaccttcgggttttcttttcactctacactggccttgcaccaaaaggtttctgtgtttctttccaaatcctgttggctaggttatcaaaggacattta

SEQ ID NO: 18437 - DNA, 250 bp, Zea mays
  Clone ID: LIB84-028-Q1-E1-F3
acggccaaaacatcgcaaccaacagcgtaaaactgatgaatagctttactatttacatgaattttacgctgttggttgcgatgttttggcaggtcgagtcagtcgactcgacaccgtaggactgatgtctatagtagtgctattcatcagtttactgctttgtaacatctgtaactgaccgtgtactctgtatctacctattccaccgaagatgtacccggtaccatcctggccgtacagctcctgcggg

SEQ ID NO: 18438 - DNA, 339 bp, Zea mays
  Clone ID: LIB84-028-Q1-E1-F4
acgctcacctccccaaccgtttgcctccgtctcgcgtgacttcattcccagcggccggcggcgacctccacgtggtgccattcgccggcaacgagcacccgcccaccaggatccaggtttgtgctgcgagagcgcctatccattcaccatgattaatttcgtgctcctgatcagccgccagggcaaggtgaggctcaccaagtggtattctccttacacccagaaagagaggaccaaggtcattcgcgaactcagtggactcattcttacacgagggcccaaactctgcaattttgttgagtggagaggttacaaggtcctataccggaggtttgccag

SEQ ID NO: 18439 - DNA, 339 bp, Zea mays
  Clone ID: LIB84-028-Q1-E1-F6
ggacaactgggcactggtgataacctctcaaggaactttccttttgaagtggcatactttaatgcaacacatattgagaagcttgcttttggtatgcgccattctcttgtactactgaaagacaattcagtgtatggatttggctcagcaagacgaggacaagttggtaaatgtgcttctaggatccaaaaatcatataatgttcctagactgattgatggttttccaaattgtaagatagtaaatatatatgccaatggcgatcacagtgctgcattggacgaatctggtcatctgtatgtctggggaagagcattaattggacaacatgatgatgat

SEQ ID NO: 18440 - DNA, 386 bp, Zea mays
  Clone ID: LIB84-028-Q1-E1-F7
acgcccacgcgtccgcccacgcgtccgcccacgcgtccgctaacaaacactaacctagtgttactcaggcaagccccggtgcatgcaaccccttccttatgtttttaaataattttcgcacactttaagtctagtgaaatgtgcattaggtttataggagttgcttgaaaccctttgatgcattgccttccttgatatccataccttattagatacttctggtgaagtatcaaaatatgatttacaaaaatgcttagccctgctcagatcttgtggatagaggttgtcttttgcgttaaggccttgctcaggggttatcctgaggaaagatggcttccacctgcaagaataatttcaatgaaaaccttggtggaatctaacggaaa

SEQ ID NO: 18441 - DNA, 329 bp, Zea mays
  Clone ID: LIB84-028-Q1-E1-F8
acgcccacgcgtccgcatgagccacgatttccctgcggtcccgtcgttgcggttgttgggggtcaaccgtatcctcgggcatccggttgcatgcctcagttgccgccttggagctcgttgtggccgttgcggccaaccccgcaagcccgtccttcctccgctataagcctctaatcgcttgtgaccgtgcccctaccttcctttgaaccagtccccgagagctccgtgtccatggactcgccaccgctaaacagagagtacggggaaagcgccgccgcgaaggcgtggccggccacatcgagcgggaccttggtgactgggatggttgc

SEQ ID NO: 18442 - DNA, 367 bp, Zea mays
  Clone ID: LIB84-028-Q1-E1-F9
acgcgttcacagatctggccgaactggccgtgctgggaagaagggcactgcaattgtgatgtacaactatgaacaaagtaaagctgtgcgggtcagtgaacgtgacgtacgatgcaagtttactgagcttccaaaaattaacgttgacggatccgacttgctgggtggtggatttgactccttcgggggtggatgtggtgggtatggtggctcaaactatgggcgctcaccagggggctttggtagacgtggcggtagtggtggttttggccgatcaggcggtggatgatttggcacttctgggtttggccgctcaagtgctggatttggtgactcgggatttggacgctccgggggtggacggttt

SEQ ID NO: 18443 - DNA, 199 bp, Zea mays
  Clone ID: LIB84-028-Q1-E1-G1
catgccaccgatcacagtacagcaaccagtgcatggtggtccgtggaccggggcctctgtagctgggcatggtctatgccggacgtcgaaagacggtaaggtcctcttcgactcgtgggtggataccgacttcatgaacggagatgactcaaggccgttggcatgatgatcatccggaaccagcggtgctcagtgctca

SEQ ID NO: 18444 - DNA, 386 bp, Zea mays
  Clone ID: LIB84-028-Q1-E1-G10
cgccgtctcgcacaggctcgttgttcctcttatccgcggaggaagaaccttggcccgacaccatgctcccaatggccgtccaccccaccaccacgccggccttgtccccgcgcgcccgcgtctcgccgcacaggcctcccatctcctccctggcggacccctcgtcctccccctgccatcgcatcgtcagtttcaaaagcaggaggctgccacttcgctctctccacatcgccgctgccgctgccgccggggcagaggaagaagaggcgcaactaggtggaagtgtgaacgcggtcgacgaggaggaagcggagaataaggtggtggtgcccgagagacaggacccgatgctggtactcaagttcatctggatggagaacaacatc

SEQ ID NO: 18445 - DNA, 96 bp, Zea mays
  Clone ID: LIB84-028-Q1-E1-G11
acgcccacgcgtccgcccacgcgtccgggttatgtatgtctggttataaccaaccattgcatcactatttttcatttttaatattggtgttacgat

SEQ ID NO: 18446 - DNA, 386 bp, Zea mays
  Clone ID: LIB84-028-Q1-E1-G12
acgggcttcggcgcctccgtcgcgcactggcgcaggaacattggggtgttgtctgaatcctataccgtctacgcgatcgatttgctggggtttggcgcgtcggacaagcctcctgggttttcttacacgatggagacatgggccgagctgatactggatttcttggaggaggtggtcaggaggcccacggtgcttgtcgggaactcggttggaagcctcgcgtgcgtcattgctgcatcagagtccagcagagaagccgtccgggggcttgtcctgctgaactgcgccggtggcatgaacaacaaggcgatcgtcgatgactggcggatcaagctgctcctgccactgctctggctgatcgacttcctgctgaaacagcggccgat

SEQ ID NO: 18447 - DNA, 331 bp, Zea mays
  unsure (1)..(331): unsure at all n locations; Clone ID: LIB84-028-Q1-E1-G3
cccacgcgtccgcccacgcgtccgaacgccgtagcaactagcaacgctaccacagtgcgcgcttgaagataggttaacaccgcttcttatcctcagttccaaccccagctcctcagttctcgtcatcgtcctcgcgctcagtgtcatttgcagttcccggtagcagccatggcgtcggtgcagctgtctgggccgcgggtggtggcggctgcgaaaccggctgcgttgggcgggctcctcctgacgccgtcccttgcggtgccaaaggggcggagggccangggcctcgtggtgagggccgccacggtcgtgtcacctaagtatacatcca

SEQ ID NO: 18448 - DNA, 361 bp, Zea mays
  Clone ID: LIB84-028-Q1-E1-G4
acggagagaagtagctagaggtagcaccagcaaaccaaataagcagaccaccttctccacccggctggcctggccggccttcgtcttcctccgatccccaggccccagccactccccgtacaagccaaaaagaccagtaggtaggcaggcagttcatcgtcgatcgagcaagatgtcggactggggccccgtggtgatcgggctggtgctgttcgtgctgctctcgccggggctgctcgtccagctccccggccgccaccacttggtggagttcggcaacctgaagaccagcgccgtctccatcctcgtccactccatcatctacttcgcgctcatcaacctcctcggcaacggcaaccgg

SEQ ID NO: 18449 - DNA, 247 bp, Zea mays
  Clone ID: LIB84-028-Q1-E1-G5
acgcagaatcagaccaccacacgcccgaggcccgactgcaagcgcctgagcccaagacccatggccatggccgccgccaccgtcgcagcgtcactgcccgtggcgcaagggctcgggaagcccctctgcgccggcagcaacgcgccgtcgctccgggccgtcgcgggcgcgccccgtcgtcggtcggccaggaccaggatggccgtcgtccgggcgtccgcgcaaaagcagcactcggccaaggagt

SEQ ID NO: 18450 - DNA, 390 bp, Zea mays
  Clone ID: LIB84-028-Q1-E1-G6
aagcattgttgagcaggctgccgtgagagatgtgcaggaggcctgtgtacatgatggatatgttctacccaaattgtatgcaaaggttcatcactgtgtctcatgcgcaatccatgcgcacattgtccgggtccgctctcgtgagaacaggaggaaccgtgagcccccgcagcgcttcagacgccgggatgatggcccaaggcctggtcagggcccgccgcgcccaggcggtgcagctcctgcagctgcacctgctgctgctcctcgtacctaagttctggaattagtttcggggcttagttttgtgaaacattacctgttttgagaaaccattgttactgtatccccttgatgttcaacgtttttagtaaaatttgtggttctgaaaaa

SEQ ID NO: 18451 - DNA, 329 bp, Zea mays
  Clone ID: LIB84-028-Q1-E1-G7
acgcacttacaagcatcaccgcgagcgaggagctgatatccacaccatctttgtgaagaagagcaaattcaggattctgctgtcatttatcggcacaacgttccttcttgtgtctgtttgctgcgccctgttatcgaaggatggtttatgtctttgttccctttggagcatttcatttgccagtgtaattgcgaaatgcctgcgatgtgaccctgtgaagaaagagtcattggtgatcatgccgacttttggaattcaattagagcaacacttttggagtggaagagttcatcgcaaatttgtgcccattggcaagattctaagaccag

SEQ ID NO: 18452 - DNA, 386 bp, Zea mays
  Clone ID: LIB84-028-Q1-E1-G8
ttccggctcgaaccacgcgtacgcacgcatactgcatacacaacgcagagcatcagaagcagctgcgatctgatcgacatggctgccgccaccatggctatcacctcccgcgcgctcgtcggcaagccggcggctggcacgagggacgtcttcggcgagggccgcatcaccatgcgcaagaccgccgccaagcccaagccggcggcgtccggcagcccatggtacggtgccgaccgcgtcctgtacctgggcccgctgtccggctcgcccccgagctacctgaccggcgagttccccggcgactacgggtgggacaccgcggggctgtcggcggacccggagaccttcgccaagaaccgcgagctgggagtgattcaatggccgct

SEQ ID NO: 18453 - DNA, 384 bp, Zea mays
  Clone ID: LIB84-028-Q1-E1-G9
acgatcctatctgcatggtttacaatgtattgggttgtgtcattgtgtgaagaatgtttggtggttagtctgaccacatattcagaagctaattatgtaatttcttatatgttgctttgaggcaaattgaacagggatttgtttggcttccaaatggtttgttggtcctaaaatagtcagaatcacatgatatctgtgctatagatatgaacctcggtggttttctccacattaggaaagctggaagagccttttgaactcattttttttgctaacagtggtgttatggtgaaacagagttttgtgtgtatgtaccaacagctaaaatgtaaacatgacattatcatagttgagtacaggaataattatctcttatatcttatt

SEQ ID NO: 18454 - DNA, 349 bp, Zea mays
  Clone ID: LIB84-028-Q1-E1-H1
agcaggcactgaggaaggagcccttgacggtttatggtgatggaaagcaaaccaggagtttccaatatgtttctgatctggttgagggtctgatgaagctgatggaaggcgagcatgtggggccattcaacctgggtaaccctggcgagttcaccatgcttgagcttgccaaggttgtccaggacaccatcgaccccaacgcacggatcgagttccgcaagaacacccaggacgacccgcacaagcgcaagcccgacatcagccgcgccaaggagttccttgggtgggagccgaagatccccctgcgtgagggccttcccctcatggtctccgactttcgcaagcgcat

SEQ ID NO: 18455 - DNA, 391 bp, Zea mays
  Clone ID: LIB84-028-Q1-E1-H10
acgcggacgcgtgggcgaccacgtcatcaatccgggccactggaccgaggacatgcgcgacgacgcgctggaacctgccgacctcttcagccgccacctcacggtcgtcgacgtcggcggcggcacggggttcaccacgctcggcatcgtcaagcacgtcaacccggagaacgtcacgctgctcgaccagtccccgcaccagctcgacaaggcccggcagaaggaggccctcaagggggtcaccatcatggagggcgacgccgaggacctcccgttccccaccgactccttcgaccgatacatctccgccggcagcatcgagtactggccagacccacagcgggggatcaaggaagcctacagggtcctgagatttggtgggctagcttgt

SEQ ID NO: 18456 - DNA, 388 bp, Zea mays
  Clone ID: LIB84-028-Q1-E1-H11
acggccaggagcttcttcaaaagttgagggagaagaacatcgattttgctgctcacagcaaccaggaggactctggttctcttctgttcaaccttattggaaatttggcattcccgcttatccttatcggtggtctgtttttactttcaagaagggcacagggtggcctcggtggacccaatggtcctggctttccccttggttttggtcaatctagggccaagtttcagatggaacccaacactggtgttacatttgatgatgttgctggtgtcgatgaagcgaagcaagacttcatggaagtggttgagttcttgaagaaacccgaaaggttcactgctgttggtgctcgcattcctaagggtgttctgcttgtcggtcctcctgg

SEQ ID NO: 18457 - DNA, 260 bp, Zea mays
  Clone ID: LIB84-028-Q1-E1-H12
cgaaacacgcgtacgcccacgcgtctgcggacgcgtggacggacgcgtgggtgcgattcaccaccaagagtagtttcttggggtgctataatagtaaggaagaataaagagccacggtgcttgacgcccacatgcgttgtaggcatggaacgggggcacctagcttgttctacagcgctgtctattttgaattggtgcgactttgttgctcttttttcctcccccttatagcttatgaaacaagatccttttgatctgtg

SEQ ID NO: 18458 - DNA, 326 bp, Zea mays
  Clone ID: LIB84-028-Q1-E1-H2
acgcccacgcgtccggaaacttgattacttgcaatcaaaactcttgcagaatgtctttttcagcctctccaaacccttgaaaaagccagggaaatggcttaatgaggctttgaaaagatcaacagataaccagggatttcagatctggatagacaaactgagactatggcttaaagagcaaacttatgcagataattcactgctgttgatagaaagctcttcatgggacaagcttagttctgatcagttacctgatgcagatgttcctatttggatcgctgcacaaagggcagtctctcgttatgaaggaattttgtcacctgttg

SEQ ID NO: 18459 - DNA, 342 bp, Zea mays
  Clone ID: LIB84-028-Q1-E1-H3
acgcccacgagtccgcccacgcgtccgcggaccaaatacacgctcccgtctcatccgatggctcctctcctttccccgccgctgctcgcggacagcgtcaccaagttccatgcggcctcaacgccagtctcgtgctccggtagcccacaacgctacgtcatcacagggttggctggggccggaaggggagagcacgactggcgtcggaggacgtggggaagaacgaacctgagggtgaaagcggtggcggcagagtcccgcagctcggatgggggaatcgctgaagattattacgctgttcttggcgttatgccagatgcaacgccgaagcagatcaagaaa

SEQ ID NO: 18460 - DNA, 342 bp, Zea mays
  Clone ID: LIB84-028-Q1-E1-H4
gtatcgactggggctgggccggtgtggtctggctctacagcatcgtgttctacttccctctggacctgatcaagttcttcatccgtttcgtgctcagcggcagggcatgggacaacctcctggagaacaagaccgccttcaccaccaagaaggactacgggcgggaggagagggaggcgcagtgggccaccgcgcagaggacgctgcacgggctccagccgccggaggccgccaccagcacgctgttccacgacaagaacagctaccgcgagctgtccgagatcgcggagcacgccaagaggcgcgccgagatcgcgaggctgcgggaactcaacaacctca

SEQ ID NO: 18461 - DNA, 348 bp, Zea mays
  Clone ID: LIB84-028-Q1-E1-H6
acgcgaagccacaggtcgaaggcggcggcggcgatggggagcgacacggagacggagaagaaggcctcggtggcgctgatgtccatcgcgaaacccctcgctggaaagaagctctgcaagcggaccctcaagctcgtgcgacgagcctccgaggcgaagtgcctcaagcgcggagtcaaagaggtagtcaagagcattcgccgcgggaacaaaggattgtgtgtgatcgctggaaatatttctcctattgatgtgattacacatgttccgatactatgtgaggaagctaatgttccttacgtatatgttccatcaaaagaggatcttgcgaccgcaagaaccactaag

SEQ ID NO: 18462 - DNA, 343 bp, Zea mays
  Clone ID: LIB84-028-Q1-E1-H7
acgcccacgcgtccgcccacgcgtccgcgagaccttcctcggacacaacatcgtcgacaatattattcttcagcgcagcggctactcagtttatccttggacagcaagttcccttctctctgtggctttctcttgcccctgtggtcattggtgtttcaatggcatcccttactgagctttcattcaactggactggcttcatcaatgccatgatatcaaacatctcattcacttacaggagcatttattccaagaaagctatgactgacatggatagcaccaacgtgtatgcttacatctcaataatcgctctaattgtttgcattccacctgcattgatctt

SEQ ID NO: 18463 - DNA, 326 bp, Zea mays
  Clone ID: LIB84-029-Q1-E1-A1
aacggacgcgtgggttcgccgccgccgcctctgcgatccccgcaaggtcgcaaacatgtctaccgtgctccagcgcccgacccccggcacggtccagtgcttcggccgcaagaagacggctgtggccgtcgcctacaccaagccggggcgcgggctgatcaaggtgaacggcgtcccgattgagctcatcaggccggagatgctccgcctcaaggccttcgagcccatcctgctggcggggcgctccaggttcaaggacatcgacatgaggatccgcgtccgaagcggcgggaagacgtcgcagatctacgccatccgccaggccg

SEQ ID NO: 18464 - DNA, 314 bp, Zea mays
  Clone ID: LIB84-029-Q1-E1-A10
gcgtccacacaagacaggatgtatctcttcccaagagcaaatatgaaaaggatgtgttcattaataatcacacgagcgtgtggggttcatggtggaaagatcatcaatggggctacaagtgctgcaagcagactatcaagaatagttactgtactggcttggctggaatagaagctgccgaggcatcagcagatctaatgaaggccaatatggctctcaaggaggctgcagaagatgagcctgtacagcatgaagagaagcgattagccacttggggaaccgatgtgcctcaggatcctgttcttaacgagaag

SEQ ID NO: 18465 - DNA, 426 bp, Zea mays
  Clone ID: LIB84-029-Q1-E1-A11
tcccgggcagacgcacgcgtcaaccgcacgcatccgtgtgtttacacgcacaggtaaagcgcgagcggagagatgggggttggttttgatttggagacagggatgagacagagcatgggatggggccatcaacaaagtggagggactagcttgcgaggcagaaagaaggtgccagtgccggtgcctccccggtgaaacgatgatgggagtgttgttgctccctcccctgcactgcctcttccctggctccgatcccccaccgttgcccatccatcatctccctctcgctctcgtttatgctcttgcctgcattctttttcacagtaggcatgcagtactacttttggttctctttgcaatatatatactgcaggtttgctaatcgctaagagcctaagaatcttccgcctggagtggactgttctt

SEQ ID NO: 18466 - DNA, 337 bp, Zea mays
  Clone ID: LIB84-029-Q1-E1-A12
aggtgatagttaacaccttccctgcaactgcctcatgtcatacccaaacgtttaaatgtttgggtgatatgatgcctgcacaattatgggacacaacaatggatcctgacatgcggctgttgaagcaacttacggttgaagatgctgccgaggccaattttgtgttcccctcacttatgggcacccgggttgatctattgcacgacctgatccacaccgctgctatcatgatcatcatacatcatcttgacatttgcatgcatcacgtactgccgtccattctctgtaccacatacattgtcagccatctgctgcatttcttgctactcgatcacga

SEQ ID NO: 18467 - DNA, 382 bp, Zea mays
  Clone ID: LIB84-029-Q1-E1-A2
cacgcgtccacccaagcgtccgcccacgcgtccgcccacgcgtccgcccacgcgtccgggccaagatccaggacaaggaaggtatcccgccggaccagcagcgactaatcttcgcggggaagcagctcgaagacggccgcaccttggccgactacaacatccagaaggagtccacccttcaccttgttcttcgccttcgcggtggcatcattgaaccttccctccaggcgctcgcccgcaagtacaaccaggacaagatgatctgccgcaagtgctatgcacggctgcaccccagggctgttaactgccgcaagaagaagtgtggccacagcaaccagatttgtatataagcaagatggtgcgagtcagctttagctgaggg

SEQ ID NO: 18468 - DNA, 295 bp, Zea mays
  Clone ID: LIB84-029-Q1-E1-A3
ccacgcagtcacggtcgcgtgagtcgtccgcccacgcgtccgcccacgcgtccgggccaagatccaggacaaggaaggtatcccgccggaccatcagtgactaatcttcgcggggaagcagctcgaagacggccgcaccttggccgactacaacatccagaaggagtccacccttcagcttgttcttcgccttcgcggtggcatcattgaaccttccctccaggcgctcgcccgcaagtacaaccaggacaagatgatctgccgcacgtgctatgcacggctgcaccccagggct

SEQ ID NO: 18469 - DNA, 351 bp, Zea mays
  Clone ID: LIB84-029-Q1-E1-A4
agtgagcccccctgcttttttttggcctctcctctccgttggcgacgcatacatccggcgagggagcggaagaagtcagtaaattctgtcgctccaatccggacgaggagatgccgcggatccctctgatcaagttccccaagcggaatctgaaagccccatccgcgccagtgccgtcgcaacccgcagatcagcacgcgaccctcatgtcccggttgggggctaaagcagaggcaccatcttctggagggattaaaaattaccgctttagttcagatgtgccttccccaacgtcgcatactgctgtaagaggtcaagcttcaatccttcctaagcgtaaacctctgactg

SEQ ID NO: 18470 - DNA, 371 bp, Zea mays
  Clone ID: LIB84-029-Q1-E1-A5
acggacgcgtgggtggtgccactgcttcacacacatatgtcctggagaccaaaacacagggcaggttccagggttcaccagctatcattacataccgtgttcccacaaagacagctcttcaggaggcatactcaactcccatcttcccactggatattctcgctgagagacctccagagaagaagtttgaatgggctaagaggcttgtgatgaaatacgggtcacttgtgtctgttgtctcttttgttggactgtttatctaccttgtcgcgagcccgtcgaagagcagctcaaaggcaagcaagaagagacgctgatctacttataggtcgcagttgacggtgtagctggtggttttgcctggaggaact

SEQ ID NO: 18471 - DNA, 351 bp, Zea mays
  Clone ID: LIB84-029-Q1-E1-A8
acggacgcgtgggcggacgcgtggggttcttcaaactgctgttgcgacggaggaaaagctaagtgtgcattcaatcacgcttgtgccgccgtcgtgtgtggtgaggaggcgttggcatcccccagtaagcaataggacatccttcggatattttgcgctttgtatctccacacagcccgagggcatgaggggggccgtgagaaataagatcctcccatggacaaggacgagtaggagactgcatgagcagcaaatgcttgggatcgttcccaaacgggttcccttattcatcgcatacagccgggacaatgatcagtagcaggttttcaaggtttcctcaattcgctcgcg

SEQ ID NO: 18472 - DNA, 409 bp, Zea mays
  Clone ID: LIB84-029-Q1-E1-A9
acaaaggacaggatgtatctcttcccaagagcaaatatgaagaggatgtgttcattaataatcacacgagcgtgtggggttcatggtggaaagatcatcaatggggctacaagtgctgcaagcagactatcaagaatagttactgtactggcttggctggaatagaagctgccgaggcatcagcagatctaatgaaagccaatatggctcgcaaggaggctgcagaagatgagcctgtacagcatgaagagaagcgattagccacttggggaaccgatgtgcctcaggatcttgttcttaacgagaagaagctccaggaatctctaaagaaggaaactgcgaggatgaaagatgacaaagacgaaaggaagacgaagtataacgtgaagtttaacgattaggttactgc

SEQ ID NO: 18473 - DNA, 115 bp, Zea mays
  Clone ID: LIB84-029-Q1-E1-B1
acgcgtcaagcagaacaggtgcaacacatgtatgcttgctggatggaggattcataccagctgatgctgatgtagtgtttcactggtgtcatgcatgtatcgtgctattataatc

SEQ ID NO: 18474 - DNA, 197 bp, Zea mays
  Clone ID: LIB84-029-Q1-E1-B10
acgcgtccaggtaatgatagagagtggtcacatttcggacacagttggcagatctgtggtactggtaggacgatcaaatacacatgtcgctgcaccttcgacagtggcggcaaacaacgcggtgcagatccgcctcgccatgatcctgctgctgttgtgggatgaccccgatgtgctacatcagcgaggcagtgctg

SEQ ID NO: 18475 - DNA, 411 bp, Zea mays
  unsure (1)..(411): unsure at all n locations; Clone ID: LIB84-029-Q1-E1-B11
acccacacgtccggtggaccggcttagtggagaaggacaccgccggccagaccaacatctactccgtcgagccgatggtgtacgtggccgagagcgccatcagctccggcacggcgggtacgtcggcggagggcgccgagaacacggccgccatcgccgcggggctcgtcctcatcaccgtagccgcggcctcgtccatcctcatccaggtgaacaagagccaggtgccgcaggtgccggaagccgcctacagcggcccgccgctcagctactacgtcaccaagttccagccggcggtggctgcgccggcgcagaccctcgaggcccccgcccccaacgagacacaagacggcgccgccgccaccgtcgcggctccggaggtaccnggcacgcagctgtcgtcgtgagctg

SEQ ID NO: 18476 - DNA, 385 bp, Zea mays
  Clone ID: LIB84-029-Q1-E1-B12
agggcacgccgacgacccggaggcgttcgcggagctcaaggtcaaggagatcaagaacggccgcctcgccatgttctccatgttcggcttcttcgtgcaggccatcgtcaccggcaagggtcccgttgagaacctcgccgaccacctcgctgaccctgtcaacaacaacgcctgggcctacgctaccaacttcgtccccggcaagtgagcgagggcatatacatacttgtatgcgtgtaccgtagacatacgtattcgtatatgtactgcaggagatgtaccagtatttgtgaagcagggagcatgggctcagagattgtaccagtagtgtacgtatttgcatgcatgctttggtccttgtggacattatcaatgaaatatgctg

SEQ ID NO: 18477 - DNA, 351 bp, Zea mays
  Clone ID: LIB84-029-Q1-E1-B4
atgatggttatgacactccactcattgaaagtgagtatcaatttggtttgtctgccaagtttgataacttcaatgttctacatggtctggaggcttctttaccgtggaagcagaagactgctattgagattgcaaataagaccaaacctagtaaggctgtagatgataaaatcgaagaaaaatacaaggccttcaaacgatttgatactgttgatgatcatagtgatcattattattcaaagccagaatcaagaaaggttcaagcggtaaaaaagccatcaaaagactgggtcaaacgtattcagcatgagtggaaagtcttagagaaagatttgccagatactatatttg

SEQ ID NO: 18478 - DNA, 387 bp, Zea mays
  Clone ID: LIB84-029-Q1-E1-B5
acccacgcgtccgcggacgcgtgggggggcgatggccgcggcaaggtagtggacggcgggcgcgggctggacctgacgctggaccgcacgtccggctccgggttccagtccaagagcgagtacctgttcggcaagatcgacatgcagatcaagctggtgccaggcaactccgtggcacggtcaccaccttctacctgtcgtcccagggcgacgcgcacgacgagatcgacttcgagttcctgggcaacgtgagcggggagccctacacgctgcacaccaacgtgttcacgcgcggacagggccagcgggagcagcagttccgcctctggttcgaccctaccactgccttccacacctactccatcctgtggaacccgcagcacgtga

SEQ ID NO: 18479 - DNA, 357 bp, Zea mays
  Clone ID: LIB84-029-Q1-E1-B6
acgtttgccaaatcaacaccagcaacagcaaagcgactacagagagtaggagatgcttactctccacaccattcagtcatgcccctcgctgcgcagatcctctctgttccggcgtgctctgctaggcaggaagagatctttcatttctgccagcagttctgaggatgccgaatccggcactcccccgccgcttggtggcgacaaacaccagcaggaggttcttgcacagatcgccatgcttcagacgcagaaggtgcgcatcacagacttcttggacgagcgctctgcttacctgaccaagttcgccaaggacgccgactcggagttcgacctgattgggcagaacgcctataaaga

SEQ ID NO: 18480 - DNA, 388 bp, Zea mays
  Clone ID: LIB84-029-Q1-E1-B7
aggcgagggatcggtcctgcctcccggggattgctgggaacttgatcctgcatcgttgcctcccgagttgctgtgcctgtgcatcgaaccaccgaaatgacctgcttatggtgtcaaaggttgttgcaggtgttttagttgttaggatcggctgtgtatatggcacataaatcgcagaggaaggctgctggtttgttctgccatgtcaaatagtatgaggatccgtctgatttgccaactctagctgggcactgctcatgtttatgatccttcttcatgtagtttctcagactaacactgctctggtatatggatgattcttatgaacttcctttatattaaagccgagtcgaaacggctcctgtccggtgtacacgtcgctcaaatg

SEQ ID NO: 18481 - DNA, 338 bp, Zea mays
  Clone ID: LIB84-029-Q1-E1-B8
acaggttcatggttttgggcctgcgcacgcaaccgctactgataatgctaattttgtggcggcttcgaccgtggttgctgaaaatgattcggatgattccatgtctaagttttttgagtctgatgattctgggagttcggttgtgtggacggaggagtcttcggatgaggacttggattattttgcggccttggatgtggctgcggcggaggcttctccgcgtgtgatggatgctgaagttcttcctggtccgagtgctgggcgtatgcggcgaagggaggtggcgaagcgtagagtgagtgaggtggagagtggtcatcttcgtgtggatggggctg

SEQ ID NO: 18482 - DNA, 421 bp, Zea mays
  Clone ID: LIB84-029-Q1-E1-B9
gcgtccacccaaaacctcgactcgcttcgcgtcggctcctacatcgacgtcaagggcccgcttggccacgtggagtacaccggccgcggcagcttcgtcatcaacggcaagcaacgccatgcgagccgcctcgccatgatctgcggcggaagtgggatgacgcccatgtaccagatcatccaggcggtgctgcgcgagcagccggaggaccacactgagatgcacctcgtgtacgccaaccggacggaggacgacatcctcctccgcgacgagctcgaccggtgggcggccgagtacccggacaagctcaacgtgtggtacgtcatcgaccatgtaaagctcccggatgaggggtggaactacagcattgggttcgtcacggacgccgtcctgcgggagcaccgttcccgaaggtggggaa

SEQ ID NO: 18483 - DNA, 184 bp, Zea mays
  Clone ID: LIB84-029-Q1-E1-C1
acccaagcgtccgcccacgcgtccgtgtagcagcagtcgtcgtttcgatacctgcttgtaggcgcaagcgtgatcacgtcctatgtgctgctgcttgtaatttgtgtattgaggagacgaactgtgcgtgccgcttgttatattgttgccacggaaagagaagcagatatatgagcactgcctt

SEQ ID NO: 18484 - DNA, 403 bp, Zea mays
  unsure (1)..(403): unsure at all n locations; Clone ID: LIB84-029-Q1-E1-C10
acgcaacctccaaagccactcccaaacccccgcttccagaaccttctcgaagctccccgccgcctcctccactcgcaccgatggcgaaggaaccaatgcgcgtgctcgtcactggcgccgcaggacaaattggatatgccctggttcccatgattgctaggggtgttatgcttggtgcagaccagcctgttattctgcacatgcttgacattccgccagcagctgaagcccttaatggtgttaagatggagttggttgatgctgcgtttcctcttctgaagggagttgttgctacaactgatgttgtggaagcctgcactggggtcaatgtggccgtcatggttggtggattccccaggaaggagggaatgganaggaaagatgttatgtcgaaaaatgtttc

SEQ ID NO: 18485 - DNA, 415 bp, Zea mays
  Clone ID: LIB84-029-Q1-E1-C11
gcgtccacttcactataaattcgtcgacctctccatatcacagagagatagagagagagagagatagacaggagagagagagagaggggaagagagagagagagagagagagagatagatgtggtaactcaagaactgttcttatgcatgcagcagccataagcattgctactagcgtctcctgcacgtgctgtgtcgtttccagggtttcatgcggggcgaagcagctggtctctgccgcctgaacgccgccggaatctgcgaggcctccccgagctgcgtgcgtcgtcggataaggcagccggcacggcaatgccggttccgcttgctccgtacccagctcctccggcgccattcacgccgcccaatggggcccagagccagctcgtctgcaccgggtgccggaacctcctca

SEQ ID NO: 18486 - DNA, 390 bp, Zea mays
  unsure (1)..(390): unsure at all n locations; Clone ID: LIB84-029-Q1-E1-C12
cgcgtccgacgaaaatggcggcggcggttcctctcccctgaccagagccagggcgtgccactgccatgtcgccactgacaaaggcggcgtcggcggcggcggcggcggagtttctcatctcttccggattggatacagggcgtgccatgcctgcgtctcagatctcacgattggcatgcgccctgacttctcgctcttcgtatctccccctccctctcccggcccgtgctagcgtcggaggaattgtattgtcgtagatctgttgctccataaatgccttccctatctgtggccgagcgcaaccaagaaacgaggtatggccggagggagaggtanggctggtcggctggacctggtcggctggacgttgccggactggacttttccctg

SEQ ID NO: 18487 - DNA, 349 bp, Zea mays
  Clone ID: LIB84-029-Q1-E1-C2
aatttcttatagcattgtctgggagatagcaaaactgtggatgaaaggctgcaaggttatcatccttgacatcccgctgctgtttgagacaaagatggatagatggacgaatccaatcattgttctctgggttgatccaaaagtccagattgagaggctcatttcaagagatggatgctctgaaggacaagctcagaataggatcaatgcacagcttgcactagactggaagaaatcagaagcagacatagtgattgacaattctggttccctggatgacaccaaacagcaattccaagaagtgttgatgaaagtctcggagcccttgacatggaaggaacgcttgaga

SEQ ID NO: 18488 - DNA, 158 bp, Zea mays
  Clone ID: LIB84-029-Q1-E1-C3
agggcatgaatgtacttcctcaaaggctgtgtcctgtgcctataaatagtgaacagtattcctttaatgttcatgcattcctgtaattgcaaacgcatcactcgggaattattttttgtcaaggcaaaggtataaatgtacctaaatattatgttttc

SEQ ID NO: 18489 - DNA, 346 bp, Zea mays
  Clone ID: LIB84-029-Q1-E1-C4
acccacgcgtccgccgcccttttttttttttttttttttttttttttttttttttttttttaagaaccaacacgcctcacaaaggctaactcaagaattctgacttgaccatcgcatgtggcctgagcctgagaacaaataaaattgatctagcaacagaacagaaggtattgtcgtagattggcacctgaagatatattttctcagtggatcaatgtttcatggacataaaaaaatgtataacacgtagagcacttatactggcagaggctgcacccaggctcaatacaggaccactcactaatcgttactgcactcccgatgtcatattttgttcgtcaggtga

SEQ ID NO: 18490 - DNA, 397 bp, Zea mays
  Clone ID: LIB84-029-Q1-E1-C5
ggtatacaggagtgctctgcccatggagaaggcggggcaacaacgccatgttatcggcggcggcggcaagaaggcgcccgcgctggggctgcagaagcagaactcgtggtcgccggacatcgagcgcgacgaggcgtgggagcgccggcgcaggggcatgcgccgcgggggcacggcgctgcgccgcgcccgcagcgtcacggacgacgacctcgacgagctccgcggctgcatcgacctgggcttcggcttcgagccggcgcacgccgccgcgtgcgcgtgcgcctgcgcctgcgccgggaggaaccgcctcctggagacgctgcccgcgctcgacctctactacgccgtccacggcggggccgcggaggcgccgccgtgctcgtgcggcgccgcc

SEQ ID NO: 18491 - DNA, 177 bp, Zea mays
  Clone ID: LIB84-029-Q1-E1-C7
aggttgtaaacttttatgaggggcatgattgtaattcctcacaggctgtgtcctgtgcctataaatagtgaacagtattcctttactgttcatgcattcctgtaattgcaaacgcatcactcgggaattattttttgtcaaggcaaaggtataaatgtacctaaatattatgttttc

SEQ ID NO: 18492 - DNA, 341 bp, Zea mays
  Clone ID: LIB84-029-Q1-E1-C8
agttcagggagctggtgaacgacctcgcgatgcaggtggtagcgtgtccgcaggtcgactacgtctcggtggacgacatcccggagagcgtcgtcggcaaggagaaggagatcgagatgcagagggaggacctgcagtcgaagcccgagagcatcagggagaagatcgtggaagggcggatcgcgaagaggctcggcgtgatggccctcctggagcagccctacatcaaggacgacagcaagacggtgaaggatctcgtgaaggagacggtcgcctcactcggggagaacattaaggtgcggaggtttgtccggtacaccctgggcgagaactgatcggtg

SEQ ID NO: 18493 - DNA, 418 bp, Zea mays
  Clone ID: LIB84-029-Q1-E1-C9
gcgtccacccacacgtccgccatgccgaagatgcttaatgatggagctgttgagtatgaggatggtacacctgcaactgaagcccagatgggtaaggatgtcgtatcattcctttcgtgggcagctgagcctgagatggaagagagaaagctgatgggagtgaaatggatctttctactatcactagcgcttctccaagctgcctactaccgccgcatgaggtggtcagtcctgaagtcccgaaagctggtcctggatgtcgtcaactgaggactatcattaccctttttttattgaaatatgttgagccgttaaggagcattcaaaataatgagttggtggtgtacaattttgccactggggctaggttccatgcctagaaattaatttgttttctttactctgctgagctgcaaaa

SEQ ID NO: 18494 - DNA, 390 bp, Zea mays
  Clone ID: LIB84-029-Q1-E1-D1
accaacaaccagcagccgcaccacgcacccagcgcaaagcgatggcgtcgctcaccatgatggcgtccttcgccgccgtggcggtggccgcgccctcgcgccgcggcaccttcgccgtggtcaggtccgccaaggtcgaccgctgccaggagcccgccacgctagcagcaaccgaggccaggcccgccgccgacggacgccgcgccgtcatgctcgcggctgctgcggcggccgtggcagccatcggcggcgccggcgccgccatggcgggccccaagaacgggacccccgaggcgaagaagaagtacgcggccatctgcgtcaccatgcccaccgccaaggtctgccaaaactgagcacgcccgcgttgcatgcaactgcagggccggg

SEQ ID NO: 18495 - DNA, 398 bp, Zea mays
  unsure (1)..(398): unsure at all n locations; Clone ID: LIB84-029-Q1-E1-D10
cgcgtccaagcgactcagcgagcgagagcagcacacactgcacgcagctagctaggagcagcagcagcggcggcgatggcggcctccatgatctcctcgtcagctctggcggtggcgcctcagggcctgccgcccctcggccgccgcgcctcctccttcgccgtcgtctgctccaagaagaagatcaagaccgacaagccctacgggattgggggtggcctgaccgtcgacgtcgacgccaacgggagaaagggcaagggcaagggcgtgtaccagttcgtcgacaagtacggcgcgaacgtcgacggatacagcccaatctacaacgaggatgactggtctcccaccggcgacgtctacgtcngtggaancactgggcttctgatctgggccgtcac

SEQ ID NO: 18496 - DNA, 395 bp, Zea mays
  unsure (1)..(395): unsure at all n locations; Clone ID: LIB84-029-Q1-E1-D12
aagccacatctcgctcttcctcggcttccgcttctcgcgtctcctcttcttcctgctcttctccaccaccgcgctctaccgctccagcacctcctcctcctcggccgcggtccttcgcgccaccaccacgacaaccaccaccacgaccaccacgacgacgacgaccaacaccttcacgctctccttcgccgccgccaacactcccccttccacccccgctaaccgcaccgcgctggatgtggccgacaagggggcggcgtccgggaacccacagagtcacgtcgtggtggggaggcacgggattcggatccggccgtggccgcacccggaccccgtcgaggtgatgcgggcgcaccggatcatggagcgcgtgcangaggaacagcgccgctggt

SEQ ID NO: 18497 - DNA, 203 bp, Zea mays
  Clone ID: LIB84-029-Q1-E1-D2
tgcagacggatgacctgcagtcgaagcccgagaccatcacggagaatatcgtgcaatggcggatcgcgaagaggctcggcgtgatggccctcctggagcagccctacatcaaggacgacagcacgacggtgaacgatctcgtgaaggacaccgcggctcacgcctgcagaccattacggttccgaggtttgtccggtacaccc

SEQ ID NO: 18498 - DNA, 377 bp, Zea mays
  Clone ID: LIB84-029-Q1-E1-D4
acccacgcgtccggaagctacagctgcagcacacagattcacagatacctgttgttccagctcggagcagatagagcatctctagctagttagtttgtggcaagagcgtgagaacccaaccgaccgagtgaacgatcatggcggcgtctctgctaggcccgaacaccggaggcaacaacggcttgggcgggagggtccacgcccggagcggcggccaccgccggtcagctgcggcggtgaagcggctgctgttgaggctgaggcgctcttggagaagacgcgcggcgcggccgaggcgaacctcggtgaggttcgggtacgacccgcatagctactcccagaacttcgacgacggcactgcttcctacgaccaccac

SEQ ID NO: 18499 - DNA, 399 bp, Zea mays
  Clone ID: LIB84-029-Q1-E1-D5
acggacgcgtgggcggacgcgtggggtctgatacagtatcccaccaaaaggtttctggtgtaagctggagtttggaaaatacgccacgaagaataggatgtgtagtctctggactaggttttgcagcgtatgggctggcgagtgctgagggtcctgtcaacaacaacatagatagcactgaatctgccatgtcttcaacaaatttatctcatgggaaagaagttcacacagactattctgttactggcattcctggtgatggaagatgtctgtttcgttctgtggttcacggtgcctacattaggtcaaggaagcccgtacctaatggggatcatcaaagaaggctggctgatgagttgagaacaaaggtcgcagatgaatttatcaagaggcgggcaa

SEQ ID NO: 18500 - DNA, 175 bp, Zea mays
  Clone ID: LIB84-029-Q1-E1-D6
acggacgcgtgggcggacgcgtgggcggacgcgtgggctggagcctgatgtttacagtgttctagaacttaaatgcggtatcgtttggatgttcatgtatcgttgagtcggtgtgtcgtgaggtagtttagcctgtgggtgatacgtctgtatttccgcagctctggcgtgagag

SEQ ID NO: 18501 - DNA, 90 bp, Zea mays
  Clone ID: LIB84-029-Q1-E1-D8
gacgcgtgggcggacgcgtgggcgccatcttacgctgttttctccattacatagttctgcagcactaaaatttaccactcttatttctga

SEQ ID NO: 18502 - DNA, 388 bp, Zea mays
  Clone ID: LIB84-029-Q1-E1-D9
gcgtccacgaaaacgcgagcgctgcggaacaacgatggcgacgatgtctcttgccgcggcgtcacccctcgcctccattccccgcggcatcgccgctcaggctccttgcgcggcattcctgtccatccgcttaggtggcgcgacggcgacgcggttcgctggactggcggtggcctcgcagccagcggagcgtcgcgccgcggcgatggtcgcgatggcgaagagggagcacgagctggaggagatccgggccatgacgacggaacagatggaagaggaggtggtagacctcaagggggagcttttcctgctccgccttaagcgctcggcgcgccaggagttcaagaacagcgagttcagccgcatgcgcaagaggattgctcgtatg

SEQ ID NO: 18503 - DNA, 352 bp, Zea mays
  unsure (1)..(352): unsure at all n locations; Clone ID: LIB84-029-Q1-E1-E10
cgcgtccagaaaatgttgaacctgctgagatcgangaagcagccagcaggagtaccttgattaatcagatagttgtgatcggccaggatcaacggcgtcttggtgccataattgttcccaacaatgatgaagttctggcagaagcaaaaaggaagtccatccttggtgaggatggcgagctagcgaaagataaggtcatgaacatgctatatgatgaattgagaacctggaccgcgcactgctccttccgtgtcgggccaattttggttgtcgacgaaccgttcacgattgacaatggtctgatgacacccaccatgaaaataagaagggacaaagtgacagacaagtacag

SEQ ID NO: 18504 - DNA, 416 bp, Zea mays
  Clone ID: LIB84-029-Q1-E1-E11
gcgtccaggtaatgttgaagctgctgagatggaggaatcagccagcaggagtaccttgattaatcagatacttgtgatcggccaggatcaacggcgtcttggtgccaaaattgttcccaagaatgatgaacttctggcagaagcaaaaaggaagtccatccttggtgatgatggcgagctagcgaaagataaggtcatgaacatgctatatgatgaattgagaacctgtaccgcgcactgctccttccgtgtcaggccaattttggttgtctacaaaccgttcacgattgacaatggtcctgattgacacccattatgaaaataagaatggacatagtgacagacatatacaggagggagatctaagccttgttcaagtcacacgcggagcgcgtgcgcacccatcaaagttccct

SEQ ID NO: 18505 - DNA, 370 bp, Zea mays
  Clone ID: LIB84-029-Q1-E1-E12
acgcgtcaacggacgcgtggggtcgccagttgaggttgttaaggaacaagataaagagtttaataaactggcaactgatgccatgattccttctatgcctggacatgtggttcaagcttttacgttgctgaaatcaagcacggaggctcagagtgttgtcgcctcccttgcatcagatagaaatgtctgggatgcagtattgaagaacgagaaggttatggagttttataagactcaccagacaactctagttcagacatcccctaacgaagccgtcacagtagagttgccggggaagctggaagatgctgcctctgaaaacacatccagcgggcgaattccccgctggctcaggcctgagtttctccga

SEQ ID NO: 18506 - DNA, 357 bp, Zea mays
  Clone ID: LIB84-029-Q1-E1-E2
acctgatcctaccgcagctctccctcaggtttagtgttcgcaatggcggccttcaacaagcttggtggccttctaaggcacagtgctctggtgagcggtatcactggtggctcttctcctgcagtgttcaatgctgcacggctcatgtctaccaagctatttattggtggtcttgactggggtgttgatgacgtgaaactaagagaagcatttagcagctttggagaggttactgaagcgagggtgatcacagacagggagactgggaggtcaagaggctttggctttgtgaactactccgacagtgatgctgccaaggaagctatttctgcaatggatggcaaggaaattgatggg

SEQ ID NO: 18507 - DNA, 385 bp, Zea mays
  Clone ID: LIB84-029-Q1-E1-E3
acgcgtcaacctaatcctaccgcagctctccctcaggtttagtgttcgcaatggcggccttcaacaagcttggtggccttctaaggcacagtgctctggtgagcggtatcactggtggctcttctcctgcagtgttcaatgctgcacggctcatgtctaccaagctatttattggtggtcttgactggggtgttgatgacgtgaaactaagacaagcatttaacagctttggagaggttactgaagcgacggtgattacagatagggagactggcaagttcacatgctttggctctgcagcctaatctttcagtgttacagtccaggcaacaattgctctatgctgctgctgctgctgaatacctgaaatttggtgttgttcgtt

SEQ ID NO: 18508 - DNA, 373 bp, Zea mays
  Clone ID: LIB84-029-Q1-E1-E4
acggacgcgtgggcggacgcgtgggatcgtgcgagccccttcggttactggtcgtccgcaggcggcaggcgaacccctctccctccctgcgatctcttagctgctcatggcaatggcagtcttaacttcctcgccgagccgcgcccgccctctccacacgagctccgctggcctacctcgtccctgcactcctgcactcgtcgtcgtcttgccgaaggagcttttgtcgccatccaccatgctgcgacacgccgagcgtcgtcattgttctcctcgtcgtccgagctctgcccgagatatcgggccgttcgtggagtctgagggaattgcaggagaggaccctgagcagcagcagcttggtgaaggttgtcca

SEQ ID NO: 18509 - DNA, 406 bp, Zea mays
  Clone ID: LIB84-029-Q1-E1-E5
acccacgcgtccggccaggaaggaggtagacagctaccggcagatcgtccgcaccaagacccagaaactagaggaggagtacgccacgaaggtggcaaagctgtgcttccaggagacggaggagaagaggaggaagaaagttgaagagctgaagacgctcgagaactcgcactacgactaccacaagatgaagctgcggatgcagaccgaaatccagggcttgctcgagcggatggaagccacaaagaagatgtgggtataggctcctgttaacaatttcatgttgctgctgcttaatgtttcgggtatagactccagctaacaactgcctgatgctgctgctgctgctgaatacctgagatttggtgttgttcgttaggagagtgtccaatggtggaattttttt

SEQ ID NO: 18510 - DNA, 384 bp, Zea mays
  Clone ID: LIB84-029-Q1-E1-E7
aggatgaacaaactcactaggaagcttgcaagaattccagatgaagtgcggactgaaatagagccatacttttttgagcattctgctattgttgacgaagacaaccgcaagcttccaaaactgccagagggacaaagcacgtctgtagctaaatatgtgaggacaggcctgactcctcgttgggctgatcttgatataaatcagcatgtcaataatgttaaatacattgcgtggattcttgagagtgcacccatctctattcttgagaatcatgagctggcgagcattgtgctggattacaaaagggagtgtggccgggatagtgtgctgcaatcacacacctctgtgcacacggattgcaacagtgagtctggagaaacaacc

SEQ ID NO: 18511 - DNA, 363 bp, Zea mays
  Clone ID: LIB84-029-Q1-E1-E8
actccaggacgtacgtacgtacgtagatcgatccatcgatcgctagctagctgacgaccatggcgtccctctcctctgccgccatcaccgccccttccttcacggccgcgcccgctcgcgcagtggtcagcaggaggtccttcaccgtgcgtgcctctctccgcaaggccactgccaccgccgccgtggccgttgccgccagcgtcctgcttgccggcggcggcgccatggcccaggaggtgctgctgggcgcaggcgacggcgggctcgtcttcgagcccagccagttcaccgtcaaggccggcgacaccatcaccttcaagaacaacgccggcttcccgcacaacgtcgtgttcgacgaag

SEQ ID NO: 18512 - DNA, 416 bp, Zea mays
  Clone ID: LIB84-029-Q1-E1-E9
acgcgtccacccaagcgtccggcgtcgtccctgccagcgttcgcgccgacggcgttcctgttctgatcatggcgtcggcgtcggcgactcgtcgtcatccacgaggacgacgacggcggtgaagacaataagaaccaaccaaaaccactacgcgaagcatatatacagattactgtcaacgtattgtagaaccaaggatctatgtatatatatatgtgtgcgtccatatcatcatcggaccggaataaagctagcaatctctcttcttcacgatcgagagatagcgcgcgtgcgtgtaattaagtattatagatgcatgcatgatgcatgcgtgtgtgtatcgatatatcatgtgatggtttgtatatgagctagctatagctatagctagaatcgtgtgatagtatactacaaac

SEQ ID NO: 18513 - DNA, 243 bp, Zea mays
  Clone ID: LIB84-029-Q1-E1-F1
acgcgtccactgatcggttccggcagtcaggcaaagcctgatattcatagctggttaagagatgatctgaatttgacggtttcattctttagataaaagaagcagcttgcttcctccctccgtgttcagaacgtcaggaagcaacgccccacatgttaggtcaggatctcaactctgcagcgccgtcaaggaaggaggcgaatgagtcgctcagcaggatcgttccgaaatactacagttctt

SEQ ID NO: 18514 - DNA, 390 bp, Zea mays
  Clone ID: LIB84-029-Q1-E1-F10
cgtcaaggatactgtcccagagagatgcccacaagcttcaaggggcacacagtgcaaatcacaaggcgggtcgactaggagctgcaagaaggtccacaagcaaggaatggcgctgggcaggtccgtggaccttaccaagttcaacggctacacggagctggtggcggagctggacgagatgttcgacttcaacggcgagctgaaaggctgtagcaaggagtggatggtcgtgtacaccgactacgaaggcgacatgatgctggtcggggacgacccctggaatgagttctgcagcatggtgcacaagatcttcgtgtacacgagggaagaggtccagcgcatgaacccgggcgccctgaactcgaggccggaagacagcgggctcgccaa

SEQ ID NO: 18515 - DNA, 396 bp, Zea mays
  Clone ID: LIB84-029-Q1-E1-F4
cgggtccgcccacgcgtccaagccatcaacctctgcagctacaggacagcgtgcttgtgagtggctgtgcttccgtaggggtagtagggtgcttgcgttgcgttgcagtgcagaggacactgacggacggcgaagaatcgaagatggaggcgtacgctgctggagccaagttcgactgcttgctgttcgacatggacgacactctgtacccgctgagccttggcatcaacctagcatgccgcaagaacatacaggagtacatgctgaagaagctgcggatcgaggagagccaggtccccaggatgtgcctggacctgtacagggagtatgggaccacaatggccggcctcaaggttttggggtacgatttcgactacgacgacttccacgcctgcg

SEQ ID NO: 18516 - DNA, 338 bp, Zea mays
  Clone ID: LIB84-029-Q1-E1-F5
acggcagcagagcaagaagagaaccagtgtgctagtgctacagctacggcctagctacctactacggcgcagctagcagcggcggacatgagcggcgggcgcgaggagagcaccagcagcaggtggccagagctggccgccctgcgcgcgctggcgcgcgacgcggcggcccgggccgggagggagacggcggggtggcgcgggcgggagcgagaggaccaccgccacggccacggcaagacggccaaggtgatgcacctgctgctctggggacccaagtgaggtgaagtgaagcgctgctgctgctgcagctgcctctgcctcgtggcccgcgcgcg

SEQ ID NO: 18517 - DNA, 174 bp, Zea mays
  Clone ID: LIB84-029-Q1-E1-F6
aaaaccaccgagatcgagtgcaagcagacttggttgatttacaatttgcccggtggttgctaatgatatgggatgaaacggttgccggtttggctgctattaaggttgtgtaatctgatgggcaatttcagcattctaatgccctaatgatgaatctttggccatttgctgttc

SEQ ID NO: 18518 - DNA, 389 bp, Zea mays
  Clone ID: LIB84-029-Q1-E1-F7
agggggtagctactcccccacaaccatgaatccacatgctgctgaatttgtgcctggaaaaacttcgcaacaatctgatgtggctgacagagaacccagtcctgctaatcctgtggccaattctgatctggatgttgtatcgcagaccacagatgaagcgagggccgaaacgcctgccacagaaaaggcaggtcaggttgagaaagtcgtttcaggtaaaggaaaggaaaacagggggaaagacatcgtgagaaactcatacaaaacagaacttgcaaggcaaattttactcagtttcattgtgaagtcggtgcacgacagtttaggtccctcccgggctgaaccagagaggaaaccaagtggatcagatgaagctagtaatgaacaga

SEQ ID NO: 18519 - DNA, 354 bp, Zea mays
  Clone ID: LIB84-029-Q1-E1-F8
ggcgcccccttcaaactgtctgaagatcccaatgcagaggagcgacatgcttcttgcaggggaaaccctgctaccaacgagtggatcccgtcagctgacacggtgtacccggcgtcagacaagccaagcagaagcgacagctgagggactgtatatctccagccatgagaattcagacgagtgctttccaccattagaataagaaaccacactggttgtccaccatatctttactgttctgcgtcgagattcttgtgattcttacgtggaacaaattaagcgtgctacgagttagacttctgtgttctggctgtaaatggcaaggaatgaagttctaatcgtggttcagcagtc

SEQ ID NO: 18520 - DNA, 403 bp, Zea mays
  Clone ID: LIB84-029-Q1-E1-F9
acccaagcgtccgagccaccatcgaccttcaagtctcgctacgtagcagtgcaataaaaaaagcagccgcaatggcgagcagcaccatggccctctcctccacggccttcgccggcaaggccgtgaacgtgccgtcgtcgtccgccttcggcgaggcccgcgtgacgatgcgcaagacggcggggaaggccaagccggcggcggcgtccgggagcccgtggtacggccccgaccgcgtgctgtacctgggcccactgtccggcgagccgccgagctacctgacgggcgagttcccgggcgactacggctgggacaccgcggggctgtcggcggacccggagacgttcgccaagaaccgggagctggaggtgatccactcccgctgggccatgctgggcgcgct

SEQ ID NO: 18521 - DNA, 350 bp, Zea mays
  Clone ID: LIB84-029-Q1-E1-G1
agagaagtgcaaggaagcaggcggccaccatggtgaagggacgcacgggacagcgcgtcaggctctacgtccggggcaccatcctcggatacaagaggtccaagtcgaaccagtacgagaccacgtcgctcgttcagatcgagggggtgaacaccaaggaggacgtcgcgtggtacgctggcaagcgcatggcgtacatctacaaggctaagaccaagagcagcgagacccgctacaggtgcatctggggcaaggtcacccgcccgcacggcaactcgggcgtcgtccgcgccaagttcaagtccaacctcccgcctgagtccatggggcgcaaggtcagagtgttcatg

SEQ ID NO: 18522 - DNA, 335 bp, Zea mays
  Clone ID: LIB84-029-Q1-E1-G10
acgcgtccagtggaaactgactggtgtcggggtagggcgaggtaatcatccgtcagcgcgttgttgacaacgacgacaactacggttctgtacggatggagattttggtgacatagtcgcttgattcatgatgactccactgacttattacacagttggtatggtctacgtggttcgcatcggaatcgacaggagtacttgagaaatctagatgagaaagttctatagctctgagacgtaatccatagtatgagtaccatctcctcagctactgctggagccgtcatgagagttgcatcagattagtatctacaagagaagaagctggtcctctc

SEQ ID NO: 18523 - DNA, 394 bp, Zea mays
  Clone ID: LIB84-029-Q1-E1-G12
gcgtccaccagattctcaacacaacagacaacaccgctcaccgcatatatatagatgggttccgaggggccttctcccgtcaccgtccacgtcaccggattcaagaggttccatggagtcgccgagaacccgacggagaggatcgtgcgcggtctccagccattcatggagacgagagggttgcccaagggccttgttctcgggagctgcaccgtccttgaggccgccgggcagggcgcgcttggcccgctgtatgaactgctggagtcgaccgtctccggccgggaacgtcaggagcgagtaattctgctccattttggcgccaacagtggttcacataggtttgctcttgagaatcaagctgttaatgaagctactttccgttgccccgatg

SEQ ID NO: 18524 - DNA, 363 bp, Zea mays
  Clone ID: LIB84-029-Q1-E1-G4
cgtcaacggaagcgtgggttacagtaattcctgcacagtctggttttacatgggtgaacgcagaccccctattcaactttatgttgaacaactccatttatcagattttgggtaatcttacagagctcaaggatcagctgaaacttggattgaacttaaggtcataccagaaaatatattttcagttcaggaatgagattggttcttcagttgaagctccagcaactattgtggcatcagtattagatggaagcagcaatcttttaccagatagattgagacaactagctaagctaatcagagaacctgatgcgatgaatcttggacttaatcactctgtatttggtaaagttaagggtgttc

SEQ ID NO: 18525 - DNA, 205 bp, Zea mays
  Clone ID: LIB84-029-Q1-E1-G5
agcaggtgaagccacggacggcataactatttgtacactcggtttgcataagaaccgactgcacatctgcatttgcaccgtcggttgcaagttgtgatagactcggcgggaagttttatgtaatataaaataaagtataggtgaagtacatgtttttagtataaatttttatcctgtaattttatagttattgaattttatgact

SEQ ID NO: 18526 - DNA, 373 bp, Zea mays
  Clone ID: LIB84-029-Q1-E1-G6
gtggacaaggtggagctgctctactccaagttcgtgtcgctggtgcgctccgaccccatcatccagacgctgctccccatgtcgcccaagggcgagatctgcgacgtcaacggcgtctgcgtggacgccaccgaggacgagctcttccgcctcaccaccaaggaggggaagctcaccgtggagcgcgagaaggtgaagatcgagacgcagcccttctcccccgtggtgcagttcgagcaggaccccgtgcagatcctggacgcgctgctcccgctctacctcaacagccagatcctccgtgccctgcaggagtcgctcgccagcgagctcgccgcccggatgagcgccatgagcagcgccaccgacaaagcca

SEQ ID NO: 18527 - DNA, 374 bp, Zea mays
  Clone ID: LIB84-029-Q1-E1-G7
acggacgcgtgggcggacgcgtgggtcagaatgaagcaagtgttgctgggacacgctacaacgtgcctctgatcaattcacttgttttttatgttggcatccaagctgtgcaacaactgcaactgaacaaggctaatccgtctgcatcagtaccagattaaccatatatctccgatggacattttccagattggaacagctaccgatatattcaggagtcttataacaagtttggatacagagggccgctaccttctgttgaatgcaatcgctaaccaactgcgctatccaaatagccatacacactactactccttcatcactctgtatctattttccgaggctacccaagaaattacccaggagcaaatcac

SEQ ID NO: 18528 - DNA, 395 bp, Zea mays
  Clone ID: LIB84-029-Q1-E1-G9
acggaagcgtgggctacgggatcgaaggggttgtaccttcagaactactgccacctgaagtaaatgccaagttttcttctaaacccgcagagaaggttaagcggacgagaaaggaagattcaaaaagcgtgtcagctcatcagcccagagagcatcaggttgctgcgacacccgaaaccgacggcggtgttgacccggaagaaggcgaaggcgcggcgccaatggattccgacaacggcgcggtgggggatagccagaaacggagcccgggggaggtctctggccctgaaagcgggcagtgcgagcctgaggcggatggcgatgataacgtgaggacggaaactaccagtagggatgctcgtgccggagagatgaaatgaaacagtggcatgaag

SEQ ID NO: 18529 - DNA, 359 bp, Zea mays
  Clone ID: LIB84-029-Q1-E1-H1
acgcgtccgccagcgtccggaagaataggaagttcactgagactgttgagcttcagattagtctgaagaattatgatccacaaaaggacaagcgtttcagtggctctgttaagttgcctcacatccctcgtccaaagatgaaggtgtgcatgcttggtgatgcccagcacgttgaggaggctgagaagatgggacttgactacatggatgttgaggccctcaagaaaatgaacaagaacaagaagcttgttaagaagcttgccaagaagtaccatgcttttttggcatcagagaccatcatcaagcaaattccccgtctccttggtcctggtctcaacaaggcatgcaagttccccact

SEQ ID NO: 18530 - DNA, 108 bp, Zea mays
  Clone ID: LIB84-029-Q1-E1-H10
cgagcatcgtggatacatgcaattcctctgcacatggatggattgggatgtaacttggaactgttaattttttttactttgatttggatgcatcatgacccccccttc

SEQ ID NO: 18531 - DNA, 366 bp, Zea mays
  Clone ID: LIB84-029-Q1-E1-H11
gcgtccaccctagcgtccgaaggcaggacaaatgacatctgggcaagttgttttagttacagcagctgctggtggaacaggacagttcgcagttcagctggcgagattagcaggcaacaaggttgttgccacatgtggaggtgaaagtaaagctgaacttctggcttccttaggagttgatcgtgttatcaattacagaaatgaacgagtcaaagatgttctgaagaaagagtttccaagaggtgtagatatcatatatgaatctgtatgtggggaaatgtttgacttgtgcgtgaacgcacttgcagtccatgggcatctcactgtaactggtatgatctcccagtaccaaggagaggatggctg

SEQ ID NO: 18532 - DNA, 307 bp, Zea mays
  Clone ID: LIB84-029-Q1-E1-H12
cactgggagcaacgatcggccgttcggcgcgaccggtgtcaagaggcgccaagacatcgggatgatcagcgccgtgcccgggactaaggctctcgacatgaacaccgccgacgacgatatcgtgcgcctcacgcgcgacgtcgttcccggcatgatcgtcaccggaatggaggtcgccgagattgacggcgcccccaggatgggcccgacatttggcgccatgatgatctccggccagaaggcggcgcacctggcgctcaaagccctgcgcaggcccaacgccgtggacgggaccatgtcgccgccg

SEQ ID NO: 18533 - DNA, 81 bp, Zea mays
  Clone ID: LIB84-029-Q1-E1-H2
acgcgtcaacggaagcgtggggtttttgtaataccaaataatcagctgttttattttaattgagaaagtcgtggttctgtt

SEQ ID NO: 18534 - DNA, 372 bp, Zea mays
  Clone ID: LIB84-029-Q1-E1-H3
acccacgcgtccggtgaacaccagccgtattgtcccgaccccgaccgatcctcgcctgctgcagccatggcgacctccgcggcgctctccaccgccgccaatcccacccagctctaccggtcccgcgctttgctgggcaagccggtgaaggggcttggcctgagcatgggccgcgagcgcgcccagcggagcattgtgtgccaggcggcgagcagcatctccgccgaccgcgtccccgacatggagaagcggaagctgatgaacctcctcctcctcggcgccatctcgttgcccactgtcggcatggtcgtcccctacggcgccttcttcgtccctgccggctccgggaacgcccgcggcgggacctacgcc

SEQ ID NO: 18535 - DNA, 365 bp, Zea mays
  Clone ID: LIB84-029-Q1-E1-H4
cgcgcaacacgggtgtgccggctactttcaccggccgcaagtccagtatttgcttgatccttgacgagcgggagagagagagagaggaagacgagaggcagcgaaggaaacagtagttcttcagttaggcaggagggcacaggaggaggaagatggcgtcgaagaggatccagaaggagctcaaggatcttcagaaggaccctcccacctcgtgcagtgcaggtcctgttggtgaagatatattccactggcaggcaacaataatgggtccatctgatagcccatattctggtggagttttcctagttacaatccattttcctcccgattatcctttcaaaccaccaaaggtggcattcccgcac

SEQ ID NO: 18536 - DNA, 356 bp, Zea mays
  Clone ID: LIB84-029-Q1-E1-H5
acggacgcgtgggcggacgcgtgggttcgccgcaccagcgccagcccgcgccgtggtcagaaggaggtccttcaccgtgcgcgcctctctccgcaaggccaccggcaccgccgccgtggcaatggctgccagcgccctgcttgccggcggtgccatggcccaggaggtgctgctgggcgcaggcgacggcgggctcgtcttcgagcccagccagttcaccgtcaaggccggcgacaccatcacattcaagaacaacgccggcttcccgcacaacgtcgtcttcgacgaagacgaggtgccgagcggcgtcgacgccaccaagatctcgcaggaggagtacctcaacgcgccaggcc

SEQ ID NO: 18537 - DNA, 390 bp, Zea mays
  Clone ID: LIB84-029-Q1-E1-H6
acccacgcgtccgcccgcttcgctcgcggcggctgtctcggcgtctctggcatttacgtcctcctccgcgtttgcgggttcatctttgggaatcgagttcagctacagtataatgacaacacggagatcccgtggtatgcagattagggctggaaaggctgccctctgcatgaccaagaggtcaaggtctaggaagtcacttgcccgtacacatggtttccgcaggcggatgcggactacttctggaaggaaggtactgaagcgcaggcgcgccaaaggcaggaaggttctttgcacaaggacaaactcaaacagtgggaagaaaagaatgttctaattacactgcaatttgatgtgctcgcaactgtaagtgtaatgtctacttgcaat

SEQ ID NO: 18538 - DNA, 279 bp, Zea mays
  Clone ID: LIB84-029-Q1-E1-H7
aagtcacgtctcccagatctaactcccaaagactcacgaatcccagagagcctccatggcgacgcaccgccactgcctcccactcctcctcgtggccgccgccctcgccctcgccgccgtccctgctcgcgcggcgctgggcggcgggcgcggcccgctgctgggcgggtggaacccgatccctgacgtgagcgactctcacatccaggagctaggcgggtgggcgctggggcaggcgaagcatcaggatctggcgtccgacgggctgcggttccgccg

SEQ ID NO: 18539 - DNA, 339 bp, Zea mays
  Clone ID: LIB84-029-Q1-E1-H8
acccacgaatcaacgcgcgcagcacgggcttgcctgctagtcccacaagccgccggcatcggcgcacggggagcagaggcagagcagcgcttgccgcagcaatccggacgacgctccagcggcagacggcagcaggtccggccaccttccgcgcctcgccccggccagtggcgttcacgccttcggccttccgccatgaaggccgccgcggtcctctccgtcccgccgccgtccgccgtgacacttgtgtcagtggtggcgcggcgcgcgctggtgccggcggccctgcgcggcaacgcgcggcgtggcgcggcgctggtggcgtctgccgcggccgat

SEQ ID NO: 18540 - DNA, 363 bp, Zea mays
  Clone ID: LIB84-030-Q1-E1-A1
agcatgccactattgaagaaatcgaagcggagacatccctcatcgaagaccaagctaaagaagagatggagaaagcactctaaacagtccaagccaacttcaacactgtgaggacaggacgtgcaaacccggccatgcttgaccggattgaggttgagtactacggaactccagtaaacttgaagagcatttcacagataagcactccagatgcaacttctcgtcttattcaaccatatgactaagtcaagccacaagcttattgagaatactatagttgctgcaaatcctggtgtgacaccaagcaatgatggacaagtaatacgagtgactgtcccatcattgacatctgatcgcagaaat

SEQ ID NO: 18541 - DNA, 308 bp, Zea mays
  Clone ID: LIB84-030-Q1-E1-A10
agggtcaacattcggtggcatcactacaaagataagcaacgtcagcagccagcttccaacaattaaccacgtcctctcatcgatcagaaggaagaaatccatggataccatcattctttcgctcgttgcatctgtctgcacgtttctcatcttcatctactggctgtcgaagtaggtttaccagagcaaagatattacgtacagtgttgtaagcttgggaccacactaccagtaccggtagtccggtacagatagtcttcattggtgtttgtacaatattattggttgattgaatgctgttacgatta

SEQ ID NO: 18542 - DNA, 406 bp, Zea mays
  Clone ID: LIB84-030-Q1-E1-A11
agtaccactcgagtgtgaagcgaggtgatattgttggcatatgtggttatccaggaaaaagcaaccgtggggagcttagcctgttcccgaagaaatttgtcgtgctctctccatgtcttcatatgatgcctcgacagaaaggtgaaggaagttcggtgcctgtatcgtggactccaggaatgggtaggaatatcgaaaattatgttttgagggatcaggaaactcggtatcgtcagagatatcttgatataatggtaaaccatgaagtgaggcatatcttcaagacacgatctaaagttgtctcatttatccggaagtttcttgatgaccgcgaatttttggaggtggagactccgatgatgaacatgattgctggtggagcagctgcaaggccttttattacaca

SEQ ID NO: 18543 - DNA, 301 bp, Zea mays
  Clone ID: LIB84-030-Q1-E1-A12
agcccacgcgtccgcggatcccagtacaacaaccatggcaatgtggtccgttggacggcgcctctgtcgctggccctggttaaccccaacttcaacgacggcaaggtcctcttcgtcccgtgggtggagaccgacttcaggaccggcgaggacccgtggtggaaggcatgaggatgatccgaaaccagcggtgctcattgctcacacatgagacctacgtatgcctccgttccttgtgatgaggaaatatgcttgcgttcgttctccttgggcgttgtcccaacaaattcacttgctttcg

SEQ ID NO: 18544 - DNA, 408 bp, Zea mays
  Clone ID: LIB84-030-Q1-E1-A2
acgcgtccacccaagcgtccggacccatcactctctgctcgcgcactctcacctgcccgcgccgtattcgaccgccgccaagatgaacaaggagaggctcatgaagatggccggcgccgtccgcaccggcggcaagggcaccatgcgcaggaagaagaaggctgtacacaagacggtcaccacggacgacaagaggctgcagggcactctcaagagagtaggggtcaacaccatccctgcaatcgaggaggtgaacatattcaaggacgatctcgtcatccagttcttgaaccccaaagtgcaagcttccatcgcggcaaacacatgggtggtcagtggatctccacagacgaaaaagctacaggatgttctccctggtatcatttaacagcttggccctgacaacat

SEQ ID NO: 18545 - DNA, 369 bp, Zea mays
  unsure (1)..(369): unsure at all n locations; Clone ID: LIB84-030-Q1-E1-A3
gtaccgagaagtctttaggtggggtcaaagatggtgtcgctgaagttgcanaagcgccttgccgcgagctacctcaagtgtgggaaaggcaaggtgtggcttgacccaaatgaagttagtgagatctccatggcaaactcccgccagaatatccggaagttggttaaggatgggtttatcatcaagaagcctcataagatccactctagatcccgtgcaagaagggcacatgacgccaagcaaaagggacgccactcaggatatggtaagcgtangggtaccagggatgctaggctacccaccaaggttctgtggatgaagaggatgcgtgtgctgaggcgccttctccgcaagtatcgtgagggcaag

SEQ ID NO: 18546 - DNA, 441 bp, Zea mays
  Clone ID: LIB84-030-Q1-E1-A4
cgggccggcccacgcgtccacccaagcgtccgcaaccatctaccagcgactcagcgagcgagagcagcacacacgcagctagctaggagcagcagcagagcagcggcgatggcggcctccatgatctcctcgtcagctctggcggtggcgcctcagggcctgccgcccctcggccgccgcgcctcctccttcgccgtcgtctgctccaagaagaagatcaagaccgacatgccctacgggattgggggtggcctgaccgtcgacgtcgacgccaacgggagaaagggcaagggcaagggcgtgtaccagttcgtcgacaagtacggcgcgaacgtcgacggatacagcccaatctacaacgaggatgactggtctcccaccggcgacgtctacgtcggtggaaccactgggcttctgatctgggccgtcatcctcgctggg

SEQ ID NO: 18547 - DNA, 398 bp, Zea mays
  Clone ID: LIB84-030-Q1-E1-A5
acgcgtccacggacgcgtgggctccctctcctctgccgccgtcaccgccccttccttcgccgcaccagcgccagcccgcgccgtggtcagaaggaggtccttcaccgtgcgcgcctctctccgcaaggccaccggcaccgccgccgtggcaatggctgccagcgccctgcttgccggcggtgccatggcccaggaggtgctgctgggcgcaggcgacggcgggctcgtcttcgagcccagccagttcaccgtcaaggccggcgacaccatcacattcaagaacaacgccggcttcccgcacaacgtcgtcttcgacgaagacgaggtgccgagcggcgtcgacgccaccaagatctcgcaggaggagtacctcaacgcgccaggcgagacctactccg

SEQ ID NO: 18548 - DNA, 414 bp, Zea mays
  Clone ID: LIB84-030-Q1-E1-A6
acccacgcgtccgcccacgcgtccgcccacgcgtccgcggacgcgtgggggcagcgctcggaggtggccctctgtcgggtggactggtggacacatccgcgcccatggccaaccgcggtgccgcggccggcaagctcactgtcacggagaccttctccaacctcagggagcatggcaaggtgcgtgcgtttgacacctcacgtccgtgcttcgcttcgtcgttacccttgggggccaattcacgcgagcacccacatttctcttggtgttcctgattgagtggcatggttggattgctggcgccatggtggccgatacccaatgttggtcccggttggttgcagggaataccgaattttggtcacatttagttgcaaggaaatggattacgtctttggaacaatatgtgtattc

SEQ ID NO: 18549 - DNA, 419 bp, Zea mays
  Clone ID: LIB84-030-Q1-E1-A7
cacgagtccacggacgcgtgggcggacgcgtgggcggacgcgtgggtgagcttgcccgcttgcagctgaaggcccctctgcaccgccattccccaggctgcgagtccgtccatggggaaggtgtgcctgctcaccgtcgacgagagcatcctcgtggcgttggccctcgtcgccgtcgccgccttgatgctcgtcgccctcttgctgcccccgccgcgccgccgcggcttcttctgagagcacggccacgggccatggccgggcgtgccgttggtccggttcggagtcgtggtgagtgatcggttcagagtcgctgtgacccgccagtagtgccatgcctcgtcgatctggaactgcttgcgtgtttgtacgccgggtagcatctgttgctctgtaaaccatcatgcatatgacagttc

SEQ ID NO: 18550 - DNA, 394 bp, Zea mays
  Clone ID: LIB84-030-Q1-E1-A8
acccacgagtccacggacgcgtgggcggacgcgtgggcggacgcgtgggtgagcttgcccgcttgcagctgaaggcccctctgcaccgccattccccaggctgcgagtccgtccatggggaaggtgtgcctgctcaccgtcgacgagagcatcctcgtggcattggccctcgtctccgtcgccgccttgatgctcgtcgccctcttgctgcccccgccgcgccgccgcggcttcttctgagagcacggccacgggccatggccgggcgtgccgttggtccggttcggagtcttggtgagtgatcggttcagactcgctgtgacacaccactagtgccatgcctcgtcgatctggaactgcctgcgtgtttggacaccgggtagcatctgttgct

SEQ ID NO: 18551 - DNA, 383 bp, Zea mays
  Clone ID: LIB84-030-Q1-E1-B1
acgcgtccaggaaaggggaattcctacaattgcttcaaaattccaaccgaacccaataaaaatatgggcatataaggaattccccttcgccaaattattacaaaaaacccttgttaatttggaattcacatctgcaacacacctgcgcaagaggcagccccaaacgacaagaatttttcaagaaaaaggggcttttccaggcgccgtacatcgaagatcctaacacgggagtccagatgtttgaaagcgctgaaatcatagactacctgaaggcaacatatgccctgtacccaagctcgtagtgatgtatcagaaatggtcattgtaatgttgcgtgtagattcagttcttcccggtaataaaaggaaaagaaatagtgggcc

SEQ ID NO: 18552 - DNA, 402 bp, Zea mays
  unsure (1)..(402): unsure at all n locations; Clone ID: LIB84-030-Q1-E1-B10
agcgctcggccgcgcagagtcttcatcggacatggcgcctcatcgtcgctgctcccagccctatgtacgacgcctcccctccagcttcagcacggcgcacctcctcatggccgcacctctccctgctcggcatcaacgtcgaccgtgccttgccaacggggctcacccatgttggccatgcctcccaactccgttcttggatcggctgagctcctaggcaccacctcgctgccgctctagatgttgtgcttggccctccgtgatgttcacccagtgagcagcaacagctccgcgaactagtcctccacatgtcgttagggtctgctacaccttccctgtcgccgtggagaccgtgtctccctgctccacagtgcccttcancatctgtcatcgcaacaacag

SEQ ID NO: 18553 - DNA, 404 bp, Zea mays
  Clone ID: LIB84-030-Q1-E1-B11
cccacgcgtccgcccacgcgtccgtttttttttttttttactataaagctccctttgggtatctatgcttcgtgttgatgagcaaatgttattgtgaaacagccctatctatgtactagtagaacaaaccatcttgtacgaatggaattaagcaaagaaaggaggggaaaaatgattcaaggaaataactttggtcagctagatgctatgagccagtgagggccggtggatcaggccaccatctgctccagctccggccactgcgcaaatatgtcgccggcgtgaccgtccttgacaagagagctgacccactagacgtccggctcggctgagggcagtggggatcgcgcgcggaacgcgaacgattcggacattcggaacttgtgcagctcgtcaccctggac

SEQ ID NO: 18554 - DNA, 396 bp, Zea mays
  unsure (1)..(396): unsure at all n locations; Clone ID: LIB84-030-Q1-E1-B12
agcccacgcgtccgcggacgcgtgggtggtcctggtattgtgaattggagtgaaggaggaacaaagatggtagctcatgttcctttttaccttttagcccagcaaaaaggtccaccgtctcataatttttcatttgccgacctcctcccaacagaatgaagaaaatatctgcatgagtgcattggtgcaggcatgatttctctagcagaaggccatataacgattttgttttgaagatccaagttcctttttaaaaaaggggctggtctgaacattcaggcttatttctctagcataatactcataaagagtcctgtacttttaggtcttgttcggttattcctataatacatggattgatggaattaananaaatttagaagaactttgacttgc

SEQ ID NO: 18555 - DNA, 428 bp, Zea mays
  Clone ID: LIB84-030-Q1-E1-B2
acccaagcgtccgcaaggatgaaagtgatgggcacaaagatttggaccaacagaagaataatgccaccaataaagacaaacctgctgctgagccgataattgttccaattgtactgaggatgtctgattttgatcacaaagcattgctagaggaatggatagccactagagctttcagagataattgcattcctcaggatcatcggaaacttataaacaaccttaagcttattcaggactacctttgttcttttgagtcacagggattgaccattgttgatatctcagcaaattcgtttcctcaaacattagattggcttcacagctatcttcttcagtgcatcgagcgaggtcttttggctgcgtgtttagaaagctgcaatcaaggtcaatgacactcttggatgtaacctgtccaaccacacctc

SEQ ID NO: 18556 - DNA, 415 bp, Zea mays
  Clone ID: LIB84-030-Q1-E1-B3
gcgtccaaaggaggaggtggagaccaaggtcacggcctggcagacggccgaggtcgccaagatcaacaaccgcttcaagagggaggatgtggtcatcaacggctgggagaccgatcaggtggagaaggcctccgcgtggctcaagaagatcgagaggaagctggacgagcaacgcgccaaggcgctggagaagacgcagaacgacatcgccaaggcgcggcgcaaggcggaggacaagcgggcgtcggcggatgccaagcggggcctcaagctggccaaggtgctggagctcgccaacttcatgaaggccgtcggcagggtgcccaccaagcgctccttcttctagccagccgactaccgctaccacctccgtctctccctgcctgcgtgtgatcgatgtacgctcgccgctgca

SEQ ID NO: 18557 - DNA, 407 bp, Zea mays
  Clone ID: LIB84-030-Q1-E1-B4
cacgcgtccacccaagcttctggtcggaggtggaggcaaccccaaaacctcaaggccatgaacaatgggccaaacccttggaacttttccttctccaagccccggcccctgcaaaacacctgcctcaagacctgtggccggcagccggacaaagtcaaagcagcgcaggacacgctgctgctgcgcgccaaggccaactccctggcgcagctcggcaagtacacctccgacggcgaggccgccgaggccaaggagggaatgttcgtcaagaactacagctactaattaatcacccggccatcatccgggataccgccgcccctccgagagatacgtgtgtactgatcatggttaagcacgtactccgatccattcccatcccatgaagccatgataatgatgatatg

SEQ ID NO: 18558 - DNA, 404 bp, Zea mays
  Clone ID: LIB84-030-Q1-E1-B5
acaagccccgcgtgcccatcatcgtcaccggcaacgacttctccacgctgtacgcgccgctcatccgcgacggccgcatggagaagttctactgggcgcccacccgcgaggaccgcatctgcgtctgcacgggcatcttccgcaccgacggcgtcgactaggagcacgtcgtccatctggtcgacaccttccctggccagtccatcgacttcttcggcgcgctgcgtgcccgggtctacgacgacgaggtccgacggtgggtgagcgagaccggcgtcgagaacatcgccaggaagctcgtcaactccaaggagggcccgcccacgttcgagcagcccaagataacgatcgagaagctcttggagtacggacacatgctggtggctgagcaggagaacctcaag

SEQ ID NO: 18559 - DNA, 406 bp, Zea mays
  Clone ID: LIB84-030-Q1-E1-B7
agcaccatgaggctctccaggaggcccttcctggtgacaatgttggcttcaatgttaagaatgttgctgtgaaggatctgaagcgtgggtatgtggcctccaactccaaggatgaccctgccaaggaggctgctagcttcacgtcccaggtcatcatcatgaaccaccctgggcagattggcaacggctatgccccagtgctggactgccacacctcgcacattgctgtcaagtttgcggagctcattaccaagattgataggcggtctggcaaagagcttgagaaggagcccaaattcctcaagaatggtgatgctggtatggtgaagatggttcccactaagcccatggtagtggagaccttttctgaatatcctcctcttggtcgctttgctgtccgtgacat

SEQ ID NO: 18560 - DNA, 408 bp, Zea mays
  Clone ID: LIB84-030-Q1-E1-B8
aaagaaagaaaaaatcgagaggacgccagggccgattctctgcgtgacttggggcgtcgtcgccgagttttctccggccgagggcggcgcgaccggacaaccagcgtgagcgcgaccggcgacatgactcgcggcaaccagcgtgaccgcgaccgtgagcgcgcggcggcgcggaagcccaacgccaagaactcccaggacgggctcaccccggagcagcgccgcgagagggacaagaaagctctggaggagaaggcggccaagaaggcgcagcaggcagcggccggcggcaccggtacctccacggacaacaacaagaacaaggcaggtggcaagaagtaggaggcagtggcgcgccgccacctctgtacgattaatcgatgccttgagcttgtaacttgttcgcat

SEQ ID NO: 18561 - DNA, 411 bp, Zea mays
  Clone ID: LIB84-030-Q1-E1-C1
acgcgtccacaccaacgttgatgatgctcttctcagtggaggtcagaaacaacgtgttgctattgccagggcccttctgagggacccatctatcttactgcttgatgaagccactagtgcgcttgatgctgagagtgaacattatgtcaagagcgtcatcacaaaagttagtcgagattcaaaggctaaaagaactgtggtaatcatagcacacaggctatctacaattcaaacagctgatagaattattgtgatggaaaatggtaatattgtggaggatggtaaacacattgatcttattgagaagggtggtctatattcaagattagccaggcgacaaaatgacgatctcaagtagccctggatcacagaatgtggtttagtgcacgccttctttttaaatggaatggc

SEQ ID NO: 18562 - DNA, 407 bp, Zea mays
  Clone ID: LIB84-030-Q1-E1-C11
agggcgccgtcgccctggcttgcaccttcgacggtggattgatgaccaaggccgccatattcggcacggcgaggaggtttgcagggccaggaaggcggtaggtggatggagctggtcaccctagagcaatgccatgctaatcatgtgtagcaaagcgttggttggatggatgcctggaagtgccctaagcagtcctttttgtagcaatgcactgcagaggacagaatgccttgtctagttgctcagtctagacatcatcctcatgttgcagataaggtggtgtgctcttattacagatcagtatcagttgagaaaaatagatccctgcacatcccgagaaaggaaatggacgacaaagatccagcgacacagagaagtgtacgtaagcagaccgggcatgcttgtgc

SEQ ID NO: 18563 - DNA, 330 bp, Zea mays
  Clone ID: LIB84-030-Q1-E1-C12
agcgagcgagatgaggtgcaactgcacgcatctatcgatgagcatcatcagcagcggcgatggcgggctccatgatctcctcgtcagctctggctgtggcgcctcagggcctgacgctcctcggctgccgcgcctcggtccttctccgtcgtctgctccaagaagaagatcaagaccgacaagccctacgggattgggggtggcctgaccgtcgacgtcgacgccaatgggagaaatggcaagggcaagggcgtgtaccatttcgtcgacaagtacgggtcgaacttctacggatacagcccaatctacaacgaagataactggtctccc

SEQ ID NO: 18564 - DNA, 428 bp, Zea mays
  Clone ID: LIB84-030-Q1-E1-C2
acgcgtccagtacatgtgttgtgttgtgctgtgctgcgagaagaaggagaagaggaggaagaagagcaggtgctgagaagcctgccggcgcgcgttacgacaagcatatatgggggagatcaccaatgtcatggagtaccaggccatcgcgaagcagaagcttccgaagatggcctacgactactacgcgtccggcgccgaggacgagtggacgctgcaggagaacagggaggccttctccaggatcttgttccgtccgcgcatactgatcgacgtgtccaagatcgacatgaccaccaccgtgctggggttcaagatctccatgcccatcatggtcgcccccactgctatgcagaagatggctcacccagatggggagaacgccactgcgcgcgcggcggctgcggcaggcaccataatgacactgt

SEQ ID NO: 18565 - DNA, 419 bp, Zea mays
  Clone ID: LIB84-030-Q1-E1-C3
acgcgtccagacgaacaactgagaagagctgcgcctgcgcctgcgcctgcgggaaagggaaaacatggtggggaaaaaaaggggtgttatctccccgctggaccatctcgctgggctgctggaggtgcgcgtggtgaggggagtggacctcgccatccgcgacctccgatccagcgacccctacgtcgtccttcgcatcggcaaggcgcagaaagtgaagacgcgagtggtcaagaagagcatcaatccggaatggaacgaaaaactcaccctctctattgaagaccctgccgttcctattagactggaagtatttgacaaggacactttcgttgatgatgcaatgggtaacgcggagctggacatccgcccgttagtcgagattgtgaagatgaagctccagggtgtcgctgacaaaa

SEQ ID NO: 18566 - DNA, 420 bp, Zea mays
  Clone ID: LIB84-030-Q1-E1-C5
acccacgagtccacgacacgacaccaagtcgaggagctcgagggcaccaatcatggccggcgtgaactccagcgtcgtcgggctcaagcccgccgcggcagtgccgcaggccgccgccgcctcatcgccggcgaagcgggtgcagctggccgcgcccgagggccgccgcgccgctctgctcggcctggcggccgtcttcgccgtcacggccaccaccgggtcggccaaggccacgatcttcgatgagtacctcgagaagagcaaggccaacaaggagctgaacgacaagaagaggctggccaccagtggcgccaactttgcgcgcgcctacaccgtggagttcggcagctgccagttcccctacaacttcactgggtgccaggacctcgccaagcagaagaaagtccccttcatcagcga

SEQ ID NO: 18567 - DNA, 261 bp, Zea mays
  Clone ID: LIB84-030-Q1-E1-C6
gtgttgttgttttgtttgtgttgtgtgtgtgtttgtttttttttgttgttttttttttttttttttgtttttgttttgtgtgttttgtttttgtttttttttttgtttttgttttttgttttttttgtgttgttgtttgtttttgtttttttgtttttgttgttttttttttttttgttttttgttttttgttttttttttgttttttttttgttttttttttttttttttgtttttttttttttttgttttttttttttt

SEQ ID NO: 18568 - DNA, 380 bp, Zea mays
  Clone ID: LIB84-030-Q1-E1-C7
agacaggaggaagggcaagcgcagcgccgccgtggcttccgtcgacgacgctaacgaggccatggcttcggcggaggcgctctgtgtggagcatcaggacccaccgctggcttcagcggagggaaccgatgaggccaaggcggccaacggggaggcgacggcggtggtggagccggacgagccgaggcgggactcgtcgccggagcggggcgacggggatgccgcgcggctgaagctcctcaacggcattctcatccgcacggcctccgaggagcgggagcgggtggcggcgcttgaggcgcggctcgctgaactctccgccgacgccgccgtgctcgcggacggggagagcgcggtactgctcgcggccttctctgccc

SEQ ID NO: 18569 - DNA, 362 bp, Zea mays
  Clone ID: LIB84-030-Q1-E1-C8
agataaaacaggatattctgtttcataattctgaaatagagttcttttttttagtattactcctcattaggatgtatatattaatcatcctattttaatatatattaatcatcctattttaattaggttctaatccaattagtagtaagtattttcttttttatttaatagtctctgactatcattaaataaagggtagagcaattcttttttctagagattctagagaaagtgagacaaagtgaagcgaaagagttttctttgtataagaattaggtctatatcatatctaaatagaagggaaatcaaaaagaagggaagtggggattacattggatgaatccttaaggaagacatatcac

SEQ ID NO: 18570 - DNA, 406 bp, Zea mays
  Clone ID: LIB84-030-Q1-E1-C9
cggacgcgtgggttttctgtgaaaacaaggctgatgtcgactacatccatgagtaccttcttctaaagggagtggaggctgttgctatccatggaggaaaagatcaagaggagagacagaacgcaattgactccttcaagactggtaggaaggatgttctagtggctactgatgttgcatcgaagggtcttgattttcctgacattcagcatgtcattaactatgacatgcccgccgaaatagagaactatgtccaccgaatcggtcgaactggtcgatgtgggaagactggcatagcaactaccttcatcaacaagaaccaaactgagaccacgcttctcgatctcaagcatctgctgaaggaggcaaagcagaggattccaccggtgttggcggagctcaacga

SEQ ID NO: 18571 - DNA, 432 bp, Zea mays
  Clone ID: LIB84-030-Q1-E1-D1
cgcgtccattgcaagcaagtcagggagttgctgctgccaattccttctccatgtgcttcgcacaagatggccatggtagaatcaattttggggacactggaagctcagatcagcaggaaaccccgttaaacatgtataaacaaaatccatactacaacataagcatcactggtgctacgtggggagtaaatccattcacaccaagttcaacgctattgttgactctggcacctctttcacagctctgtctgatccgatgtacactcaaatcactagcagcttcaactcacaagtccaggataagccaagccagcttgactcttctctgccctttgaattttgctactctataagtccaaaggcttctaccaatcctccgaacataagcttcacggcggaaggtggaagcgtgtttcctgtcaatgatccaat

SEQ ID NO: 18572 - DNA, 404 bp, Zea mays
  unsure (1)..(404): unsure at all n locations; Clone ID: LIB84-030-Q1-E1-D10
agctgttccaaatgcctacaccttagcaatcaacggcaaaaaaaccattcattgtcgttcacacaagccttgtggagctgcttactccaagggaattgcaggctgttttggctcatgagctgggtcacctcaagtgcgatcatggtgtttggctcacttttgccaatatactcacaatgggagcatacactgtccctggttttggcatggttgctggcttcctggaagagcagctatacagatggctacgagctgcagagctgacttgtgacagggcagctcttcttgtggtgcaagatccgaaggtagtcatctctgttctgatgaaattggccggaggatgcncatctcttgccgacaagctaaatgtggatgccttcctggagcaagctcgttcgtacgac

SEQ ID NO: 18573 - DNA, 398 bp, Zea mays
  Clone ID: LIB84-030-Q1-E1-D11
agacagccttacctgatccttgacaattctgctccctcgccgccgccgccgccgccgccgcccgcccgtcgtcgctgcgcttcggtacccgcgaagcaaggccccgcctcccgtgtacccgccgccgaagaagggagaggagcagatgaaagcggggaggaagaacctgcggcgggcgtgcgacgagggcgccgccgtcacgctcgccgagggagagagcatcatgcaggtcctcacgctgcgcggctccaacgtcatcgaggtgatggacggcgtgggcgtcaggtccctggccttgttccccgccaagttccagaagagcttctggatcaagaacgggagtttcgtggtcgtggatgccagcgggagggaccaggcgctggaatcggggagcaaga

SEQ ID NO: 18574 - DNA, 409 bp, Zea mays
  unsure (1)..(409): unsure at all n locations; Clone ID: LIB84-030-Q1-E1-D12
aggtaacctgaagctttaagaaaacaaagtgctcccggaagactccaagctgcagctaccggccttcctctcccccattccaattccgagaacaggggcggcggagtcaaccaggtacggtgtgctcggtagcgaggctggcgtttgtgcttgcactggccatagccgcctcatcaattacggttgcggagagcagagattttaatatctttgctcagggcagcttgcctgatgcaaccaagggatcgtcaggtctagctgcaaccagtggaaagttgtgtcagttatgcgagcagtactcatccgaggcgctcctctatctcacacanaacgagacccagactgagattcttagcattctacnacatgaatgtgccagccttgncccactcaagcagcagtgcatcac

SEQ ID NO: 18575 - DNA, 408 bp, Zea mays
  Clone ID: LIB84-030-Q1-E1-D3
acgcgtccaacccagccaagcccgcacgacacgacaccaagtcgaggagctcgagagggcaccaataatggccggcgtgaactccagcgtcgtcgggctcaagcccgccgcggcagtgccgcaggccgccgccgcctcatcgccggcgaagcgggtgcagctggccgcgcccgatggccgccgcgccgctctgctcggcctggcggccgtcttcgccgtcacggccaccaccgggtcggccaaggccacgatcttcgatgagtacctcaagtgcggctccaacgttttctggaagtggtgaagcagctagcagcagcgtctgatgggaatggaggagatcatcacctgtcttgtcgaccctagatatgtccaaactgcagggaaattaaatcttcatgtgtaattgtg

SEQ ID NO: 18576 - DNA, 431 bp, Zea mays
  Clone ID: LIB84-030-Q1-E1-D4
cacgcgtccacggaagcgtggggggaacccaccatatgtcatgatgtgattgatgtaggctggtccacattagcagatctaactgttgacgaagggaaacttcttggctgctcatataaccaaaattgtgtcggtgtgtgggttgtggatttgatgagaaatgagccttatgttgatagtagtgctggatcacacttaaatggaagtataaataggccaattcaatcagatgatagcatgtcatcagtgtttgggaggctatcgatttccagaagcccagccaatgaaattggatcggatactctgcttggatgctcaatgtctggttcaaaagaaagtcctgtctcaacttctgcatcaatgaggggattgtcaaagccacctggaaaaggggacctccggctctcaagatctatttctacacctcttct

SEQ ID NO: 18577 - DNA, 411 bp, Zea mays
  Clone ID: LIB84-030-Q1-E1-D5
acccacgagtccacccacgcgtccgcccacgcgtccgggtgttcgccggcgacgtgcagagcagggaggcagggtgcggcgcggcgtccaccagtggtcgggcggcggccaccaccaacggcgtcctgtcgctgctctaccgccagggcatggagatcgacgcgctggtgcggctcgagaccgagaggatgcgtgcggggctgcaggaggctcggcggaggcacgcgcgcgcggtggcggcggccgtgcagcgcgccgcggcggggcggctgcggctggcggaggccgagctggggcgcgcccgccgccgcaacgccgagctggaggagaggctccggcagctggccgccgaggggcaggcgtggctgggcgtcgcccggagccaccacgccgtcgccgcggggctccgcg

SEQ ID NO: 18578 - DNA, 435 bp, Zea mays
  Clone ID: LIB84-030-Q1-E1-D6
acccacgagtccacttctagattgtccaagtcgcgtggattctctccattgtaattatggggatcaatatttatttcttctgcaatagcttcataagttggcttgtgcacagtgaactcccaaggatagtcaatgttataattagcacccttgtcttccctttcatggcggcatatattgcagctttaatctacttggctttcagaaaagttaatgctgctggcatattcccttccgtgtcagcttccactgggactgaagtagaagcatggaggcaagatggcaacattgatgatattggtgtacattgatatgtttgaaacacagtatataaatatactctttcattaaaaaaatattttgttcatacaccacacattagggaagacgtcaaaccattattgaaagatgtatatagttatacatatagtttta

SEQ ID NO: 18579 - DNA, 273 bp, Zea mays
  Clone ID: LIB84-030-Q1-E1-D7
acccacgagtccagccatgtaagagaagctcatgcggccaaggagaaaaagttggctcctggcaaggtggttctggaattcgattaatgttattaagattttgtccattgggacctgaagggctgtgcgtttgcaaatcatgatagttttttttgtaaaaaaataaatctgaatctctctgccgacttcaggttccattttatcgttccgtttcagtagaaatacggtaaataatcatatcagctatggcctatgggcacgattttcctgatg

SEQ ID NO: 18580 - DNA, 406 bp, Zea mays
  Clone ID: LIB84-030-Q1-E1-D8
cgggccgacccacgcatccacggacgcgtgggcgcaagaccacctcaccagcctcctcgtccccgatctcctcccacccgcatccaagggtttccttctcgaccgtgcggaacgagccagagaacaggtatggcggcggcgcggcacctcagatccggcctccccctcctccgcgcccacctcgcatcctccgaatccgcggccgtcgctcaggtttcgaggggcttcgcgtcgcaggccgccaagcccaccgggaaggagatcaaggttccaaaggctctgtttggcggcacaggcaactatgccagtgcactgttcctcacagcagctaaatctaatgcattggacaaagttgaatctgagattaaagctattgtagaggcttccaagaagagcccgttgtttt

SEQ ID NO: 18581 - DNA, 409 bp, Zea mays
  Clone ID: LIB84-030-Q1-E1-E1
cacgcgtcaaatttagaactctctctagaagcttcctcggtctcccggttcaccgccgccccgtaccatactcctcttcgcgccgtagaaatggcgctgccgaatcagcagggcgtggattaccccagcttcaagctcgtcatcgttggcgacggtggaactggtaaaaccacatttgtgaaaaggcatcttactggcgagtttgagaagaaatatgagcccaccattggtgttgaagttcaccctctggattttagcactaactgtggcaaaattcgcttttattgctgggacactgctgggcaagaaaagttcggtggccttagggatggctactacattcatggtcagtgtgccatcattatgtttgatgtcacttctaggctgacatacaagaatgtcccgacat

SEQ ID NO: 18582 - DNA, 309 bp, Zea mays
  Clone ID: LIB84-030-Q1-E1-E10
acccacgcgtcaagtcacatcgtgtgtgagcgcctctgctggtctgccaagaggatgaaaggaatgaggagcaagtaaagatggcttgccctgcgcagtccatgctctccgccagcggctgcatcttcctgaggagcaagcctcaggcggcatcccaagtgcgagggggcatcatcggcggtggccgcagcagcaggccgttcctgctcacctgcaacgcttcctcttctccgtccccttcctcgccggcgccggcgcaggaagaccccgactgcaacgaggaggagtgcgccccggggaaggaggtcg

SEQ ID NO: 18583 - DNA, 409 bp, Zea mays
  Clone ID: LIB84-030-Q1-E1-E11
agggagatagtggatgctaaaaattacacttttttcactggaaagtgggaggcatcaccagatgatgatataagacattggtccaagttcccatcatttacgcctcttctgggtcagattgagacagatggtggcaagtctctggactttagcaactatccttatatatttatgagatggaaagagcaatattttgtcaacgttggagtcgactgtgggttaaccatcgctggtttctactacgtctgcttttcttgtagcgatggctccattaatggattttattatgatccaaatagcagtccatttcagaagctcgagctgaagtgtaccaatgagaaaaaatccgggttcaccttttcatcctacgagctgcagtgacaggacagatgccctcgacagacaactt

SEQ ID NO: 18584 - DNA, 417 bp, Zea mays
  Clone ID: LIB84-030-Q1-E1-E12
acccacacgtcagaaaatatcctggagaaacaagagtgagcttttcttgcaagaataagcgtggcacaaggtttactcctatgtttcaatggcctgacaagtctgtttcgttaggagttactcaagccttggcatggaaaagatctggtcttatggtgagacccagtatacaagtcagtgtgtgccctacgtttggaggaagtgatcctggggtacgggcagaagttgtccattcattgaaagaggaattgaatctgatgtgtggcctctcttgctcgcggcatccatcagcttatactgctctatctattggacgatcaaagtggaacggtcaagtgggcagttctggagtggtaatcaccttggaaacacctcttaataacattggaaggccgtcgttatctgttcaactgaatg

SEQ ID NO: 18585 - DNA, 359 bp, Zea mays
  Clone ID: LIB84-030-Q1-E1-E2
tgctgtcgcagtaaagaatcgtcaacaagggcgttctaaatatggggccaaaaagccaaaaaaataagtgattcgtttttagcccttataaaaagaaaacggattcttgaacctctttcacgctcatgtcacgtcgaggtactgcagaaaaaagaaccgcaaaatccgatgcaatttttcgtaatcgattagttaacatggtggttaaccgtattatgaaagacggaaaaaaatcattggcttatcaaattctctatcgagccgtgaaaaagattcaacaaaagacagaaacaaatccactattggttttacgtcaagcaatacgtagagtaactcccaataaaggagtaaaaacaaga

SEQ ID NO: 18586 - DNA, 251 bp, Zea mays
  Clone ID: LIB84-030-Q1-E1-E3
cccggccgacccacacgtccacccacgcgtccgcgcggagccgtcgtggctggcggagcccatggtgaaggcggcgttcgagaagttcggcggcaggatgaaggacatcgaggggttcatcgacgagtgcagggccaacctggacctcaagaaccgctgcggcgccgggatcgtgtcgtacgagctgctcaagcgcttctccaagcccggactcaacgggaggggcatcctcagcagcatctcggcctgtt

SEQ ID NO: 18587 - DNA, 430 bp, Zea mays
  Clone ID: LIB84-030-Q1-E1-E4
cacgcgtccacttcaacacctcttggcctctttgatcaatcaactgtgcaacagcctgtcacatctgctgcgccgataaatctgtttgctggctttaatgaacagttaccagcttctcataatacagatggtgtatccagtcattttgttgttgctaaagaacctgcccataatgttgttcagaagggcataatgccatcagctgaagcactcgccacatctcatgctgtgcaccaagatttgttcagtctgtcaattttgcaggaaccagcaacaccctcaccctctcagccaatagatctgtttgctggctttgaccaacatttgccgcatttgtctactgttcagaaaattccatcggcagttccatttcctgctaatgatggatgggctttctttgacgtgcaacatggattgttgacatctgttt

SEQ ID NO: 18588 - DNA, 232 bp, Zea mays
  Clone ID: LIB84-030-Q1-E1-E5
aagcaaccgcaatggcgagcagcaagttggtcctctcctccacggctttcgccggcaaggccgtgaaggtgctgtcgtcgtctgccttcggggacgcccgtttgactatgtgcaattcggcggcgaacgctaaggcggcggcggcgtcagggagctcgtcgtacgggaccgaacgaatgatgtagttgcggtcattgatgggccatctgacgtcctagctgtcgggcgactt

SEQ ID NO: 18589 - DNA, 416 bp, Zea mays
  Clone ID: LIB84-030-Q1-E1-E6
acggacgcgtgggcggacgcgtgggtcagatcggaggcgagcgccaccaccggccggaggaagaggacgacacgatgctgcgggttgcggggagaaggctctcgtcttccctctcctggcgccccgccgcggcggtagccagaggtcccctcgccggcgctggcgtccccgaccgggacgacgactcggctcgcggacggagccagccgcggttctccatcgactcccccttctttgtcgcttccaggggtttctcttctactgaaacagttgtcccaaggaaccaagacgccggcctagctgacctcccagcaactgtggctgctgtgaagaatcctaaccctaaggtggtttatgatgagtacaaccatgaaagatatcctcctggagattccagcaagcgtgcctttgcatac

SEQ ID NO: 18590 - DNA, 373 bp, Zea mays
  Clone ID: LIB84-030-Q1-E1-E7
acccacgcgtccgcgcggagccgtcgtggctggcggagcccatggtgaaggcggcgttcgagaagttcggcggcaggatgaaggagatcgaggggttcatcgacgagtgcaacaacaacctggacctcaagaaccgctgcggcgccgggatcgtgccgtacgagctgctcaagcccttctccaagccgggagtcaccgggaggggcatccccagcagcatctccatctgatccatcctcagcatgcattagtccaattaattaaatcgggggttgtactattattgcatgcagaggctgcttgtcgaataaaacgtactatatgtacgattgtattgtacatgtgtgtcaatgcaacaagaggcacgtttgag

SEQ ID NO: 18591 - DNA, 171 bp, Zea mays
  Clone ID: LIB84-030-Q1-E1-E8
aacggacgcgtgggcggacgcgtgggcgttgttgtatacttgtgtgttgttacttaacagcgtgtgtagtgattagcactgcacactccctgattgtaccatggtatattgaatgtttatactgctggaagaaaaaaaagggggaccttgtgatggtcagatgtttaattt

SEQ ID NO: 18592 - DNA, 404 bp, Zea mays
  Clone ID: LIB84-030-Q1-E1-E9
cccacgcgtccgattcgcttcttgttctttaaaagttcagagttcaagagttcagtttagagagagagagggggagagtgatttgccgacttgccagttgccgcacaaagctcctctagcacctctgtgtggccgacttgtccccggtatcaccaagtctgcaggcctccccagtcgtcgccggcgagggaacgcgccgcccgtgacgccgcgggttgttggcgccggcgttgaggccacaagcgcgccagcatcaggacctcacaggtgattcaatcctgaaggcatcaactatgttcaattttcaagaaatgtcttgctgttttacgtgtgcgacgggcatggaacgaaataatgaaaacgaaggaggaagcaaggtgaggattttttcctacagtgagatg

SEQ ID NO: 18593 - DNA, 421 bp, Zea mays
  Clone ID: LIB84-030-Q1-E1-F1
cgtccaaccaagcgtccgcccacgcgtccgaggagcacctgcagcatgtagcccggccttcttctacctctagccttcccctgtcgagctctttggtacatggaattttccccctctgctacacctcccctgggctacgcacttgtcctcacctccccgccatctacctcaaccagcagccaccatctccctgtatttcccagccgtggagcccaggatgccgaccagggacaccagcagccggcgtcccaagctcgagcagccgctgctcctcaacgccggcacccgccaagtttcgtcagccggtctgcagctcccctctgctcggacgccagtcgagctcctccctggcgcacctcgccagcagcagagaatctccaagtgcaggcgaccagcatctttccccatggcgcccctgctc

SEQ ID NO: 18594 - DNA, 406 bp, Zea mays
  Clone ID: LIB84-030-Q1-E1-F10
agcccacgcgtccgatatatcgtcccttctctccgactctccctcccttctccacggcccagtgcgcacctctccctccacccctcgtcgcaaggcccaggcacccgagctaggcacgacgatgcaagtcaagccggaagctgcggttccttcgccgtcaccgccatcgccgccagctccgtctttccatcaccgaagaactgaggaggacaacagcggcgtcgaaattccgcggcggtaaccggcctaaacgtatcggcgtcgcggcatacaagggcattccaggcgaggcgaacctgagaatgcccagccgaaacgtcaacgctacgcctacgccgggtacagtgcacttgcacgagcatcgttctcatggggtcactgtctcacttgctggctcactgcacgc

SEQ ID NO: 18595 - DNA, 405 bp, Zea mays
  Clone ID: LIB84-030-Q1-E1-F11
agcggacgcgtgggggacgtcatcgccgctgccgagctcgcggactacgggcccgtgcgagggaccatggtcattcgcccctacggatacgccatctgggaggccatccaggattatttgaatgtcaaattcaaggagacagggcacagcaacatgtacttccctcagttcattccatactcatttatagagaaggaagctagtcatgttgaagggtttagcccggagcttgcattggtcaccattggaggaggaaaagaactagaggaaaagcttgtggtaagaccaacaagtgagaccattgtaaaccacatgttcaccaaatggattcagagctatcgtgatcttcctctcatgataaaccagtgggctaacgtgacaagatgggaaatgcggactaaacca

SEQ ID NO: 18596 - DNA, 401 bp, Zea mays
  Clone ID: LIB84-030-Q1-E1-F12
acccacacgtcagcggacgcgtgggtggcaagattgctgacgtttggtcatgtggtgtaaccctctatgtaatggttgttggcgcatatccttttgaagatccagaagagcctaagaacttccgcaagacaattcagcgtatcttgaatgttcagtacgcaattccagacaacgtgaacatatctccagagtgcaggcatctaatttcgaggatttttgttggcgatcctgctacgcgaataacaatccctgaaatccggaatcatagttggttcctgaagaaccttcctgctgatctgatggatgatgatagcatgagcaaccaatatgaggagcctgaccagccaatgcagaccatggatcagataatgcagattttaacagagggccacataccaact

SEQ ID NO: 18597 - DNA, 432 bp, Zea mays
  Clone ID: LIB84-030-Q1-E1-F2
agagcattcatattatatgaagaagaaatcgcggattcaaaggctcaaatcactgcaattcacctgataattgggacccttcagcggatgaatatatttggggtggaaaatagagacacactcactcacaagacaacagggtactcagcaaaacttctcaagaagcctgatcaatgccgagcagtttatgcgtgttcacatcttttctgggctgatgaccaagatgggataatggatggtgaaagggttctgctttgtttgaaacgtgccttgagaatcgcaaatgctgctcaacagatggctagtgctacaaggggaagcagtggatccgtaactctatttattgagattttgaacaagtacttgtacttctttgagaaaggaattccgcagatcacaaataccgtgattcaagatttgattgaattgatt

SEQ ID NO: 18598 - DNA, 409 bp, Zea mays
  Clone ID: LIB84-030-Q1-E1-F3
acgcgtccgaccaagcgtccgcgaccacacgccaagggaagaagcagcagcgccatggccgcgccgctcacggccgtccgggcccgcctcctcctcctcccagtgacctgcacggcagccggtaccaccggccggccggcccctccgtccaagagcagcaggccgcgtctactaccaccaggcaccacccggtgccggtgctccaggcctcccatggaggcggtggcgccggtgtccgcggcggcggtggcggcgctgctgctgctgccggcggacgcggcgctggcggtgggcggcgagttggggatcctcgagggccgcagcttcgcgctgctgcacccgctcatcatgggcgggctcttcgcgtacacgctctgggcggggtacctcggctggcagtggcgccggg

SEQ ID NO: 18599 - DNA, 184 bp, Zea mays
  Clone ID: LIB84-030-Q1-E1-F4
ccggatttgttaaatttgtattttgcttctgccatgtaataaaaccgcactgtaactagaaacaggaaaaatgttgtgtaagggtcggaaaatctgctgtcgtggtccttgagcccggatttctctttcgtagttggattcattaaccggcctgagtattcctgaaaaaaaatactgtaactcc

SEQ ID NO: 18600 - DNA, 418 bp, Zea mays
  Clone ID: LIB84-030-Q1-E1-F5
acccacgcatccacccacgcgtccgcaacgacggccgacgaggtcgtccaggccaacaccgtggtgcagtccctgaacgccttctcgtcggtggcgcacatctcagggatgggcctcaaggtggtgccgatgatcgcgcccttctcaaccctccgggccgtcaacctctccagcaacctcatcgttcatatctcccctggatcgctgcccaagggcctccactctcttgatctgtccaggaacaagattgccagcgtcgagggcctccgggagctcacaaagctacgcgtgctcaacctcagctacaacaggatttcgcggattgggcatggtctgtcgaactgcacggccatccgggagctgtacctggcgggcaacaagatcagcgacgtggagggtctgcaccggctgctgaagc

SEQ ID NO: 18601 - DNA, 426 bp, Zea mays
  Clone ID: LIB84-030-Q1-E1-F6
acccacgagtcaagggatgtcataggggatcgtgggctacaagttgttgcagagacctgcaagaaattgcagaggctcagagtagagagaggagatgatgatcaaggaggtcttgaggatgaacaaggtaggatttcacaggttggggtgatggctatagcccaaggctgccctgagttgacatactgggcaatatatgtatcggacattacaaatgcagctctagaagcggttggtacatgcagcagaaatcttaatgatttccgccttgtccttcttgatagagaagcacatataactgagttgccactggacaatggggttcgtgctttgcttagaggttgcaccaaactcaggaggtttgcattttatgtgagacctggggtcctatctgatgttggtcttggctatgttggagaatttagc

SEQ ID NO: 18602 - DNA, 200 bp, Zea mays
  unsure (1)..(200): unsure at all n locations; Clone ID: LIB84-030-Q1-E1-F7
agaaggtcacagacaagcctattctgatatatcccaacagtggtgaaagatatgatggtgaaaaaaaggagtgggtggaatccactggtgtgtcagatggtgattttgtttcgtacgtaaatgaatggtgcaaagatgcagcagcccccgataagcgcanccccatctttgcaccacgcatttacgttcgaagatagggc

SEQ ID NO: 18603 - DNA, 412 bp, Zea mays
  Clone ID: LIB84-030-Q1-E1-F8
aacccacgcgtccgcccacgcgtccgatcagacaacaagatgtgcttcgattgtaacgccaagaacccgacgtgggcgtccgtcacctacggtgtcttcctctgcatcgactgctcggcggtgcaccgcagcctcggcgtccacgtctccttcgtcaggtcaacaaatttggattcatggactccagaacagctgaaaatgatggtctatggaggaaacaaccgtgcacaagccttctttaagcagcatggttggacagatggtggaaaaattgaagcaaagtatacttcaagagcagctgacttgtaccggcagttgcttgctaaagaggtcgctaaaagcgccactgaagatggcaacaatagttggccatcttcaccagttgcagcttcccaagcttcggattaaactg

SEQ ID NO: 18604 - DNA, 402 bp, Zea mays
  Clone ID: LIB84-030-Q1-E1-F9
tctcaatcttcatatgatattttcagatggttctgtgtggaggctgggagctcttctagtcctaaagtgcttttaattcacggcttgccatcgcaggcatactcttaccgcaatgtgatgcctgtactggcggacaaatatcatgccattgcttttgattggctcgggtttggattttctgataagcctcaaccaaaatatggttttgactatacacttgatgagtatacttcatccttggaatttctagtcaatgctgttgctcctgataagctctctattgttgttcagggctactttgctccggttgcagtcaaatatgctagtgaacaccaagacaaattgaatcatcttgtactagtgaatccaccaataaccgataaacatttgaaccttccatcc

SEQ ID NO: 18605 - DNA, 407 bp, Zea mays
  unsure (1)..(407): unsure at all n locations; Clone ID: LIB84-030-Q1-E1-G1
agaaccaatgggggcggcgccgtcgtccgacgactcgtcacgcgccngagacggccgggctgtggcaagcagcgcctgcctctggcactggcactggcagcaacagcaaccaggcccagtcgaagcgggcgccgccgcctcacaagttccacgagatagttgcgcaggaggcgacgacggccggcggcggcggcggcggcggcactgctgctgcagccgacctggaggatcaggcgtgcagcaccggggtctacctggctgggaaaaccaagaagtactgggtggacgagaagaccaggtgcaactgcttcgtgctgttcgctagagcgctgtccatcacttggggcgacgatcccagatactggatctggcatcccgtcagagaaaccaagtacgtgctatctata

SEQ ID NO: 18606 - DNA, 391 bp, Zea mays
  Clone ID: LIB84-030-Q1-E1-G11
acgtcagaaatgatgtaatttgtggggcgccagcatcttgtctcctagagtaatattctgtttgcagtaccaacgtcctttagcgctctggtgccaattattgcaatgcatcttgtgcacaacacgaatggcaatctggaggtgccataatgacgagcagcggagcagatggatgaacacacctgaactgcatgagctacctgttatcttcatgcatgcaacggtttgtcggagtgctatgccctcttgtactttccagttgtttcgtttcttggtggtataaggaaaggtccatgggcagcactgtgagacatggcatggtggatggtgggtgcatcggtgcttgttccaccggccctgtgatgtgagcatctcacgctggggtgttcag

SEQ ID NO: 18607 - DNA, 414 bp, Zea mays
  Clone ID: LIB84-030-Q1-E1-G12
ccgggccgacccaaacgtcagcgcaggagtggcttgacaagctgccaccaccgtcctacgaggagcgatacgtgctcacgcgcgcgtccaggaaccgcgagctcaacaagcacgcgcgcctgggctgccaggtcgtcctcgcgccggagctgcaggggatggtcgtcgccatccccgagcctaagccgtgggacatcccataatggcctgccgacgaaaggtaaggtgcggcttttgacgctgtgagccttccttaattcccttggctcggtcaagctgtgcgcctgtgccatccccttttatatgttacggatttagtgaagaataataatttgatgagcagaacttggcattggttaacttttgttcctagtatatggatgctctaatgtggaatccttttgcaactaccgc

SEQ ID NO: 18608 - DNA, 396 bp, Zea mays
  Clone ID: LIB84-030-Q1-E1-G2
acgcgtccagacgagctcctgcacatggcgtctgtcgccgtcttgcagtttgtccacgatccgcacgatgatccaccagtgctaggctgcgtacacttgactctagctcgcgtatatgccttggatcgagctcgctctctttctctcgtcaaggaccacttcacaaccttgggaaaagacctcaccgtcattgggtactgctgcgatgatgctgaaccccgtcgtcgacaactccagttctacgtcgccgagtccatgtttcgggtagcagaggttgacgcctttggtcataggtggactgtccggctgagttagccggaccgtttgtctgagcaccggattgtccgcacgtaagtgccggaccatctacgatgctggggctaggctgatgtgttt

SEQ ID NO: 18609 - DNA, 407 bp, Zea mays
  Clone ID: LIB84-030-Q1-E1-G4
acgcgtccagctgaactgcgacgtaaacaacgtggccgcgctacgcctgtacagaaaccaaggcttcaagtgcatacgagtgccggaaggagctaaatggcccgaacccaagatagctaaaggagcggagtacaacttcatgatgaagctagtgcccaaggcttgagtcttgaaccttataagatctgactagggaaaaaaagggaaaggtttggccgtgtaggttttgcacggatgcacgatttgctctccattcatgtgtacagcatttggtgtatagtggaggctactttgtaaatggtatatataacagctacgtgttggtccatagtgagtgactgagggtgtcggtgtttaaaccatccccagtccttgtgttgttgtgtgttatgttcttcagattctac

SEQ ID NO: 18610 - DNA, 399 bp, Zea mays
  Clone ID: LIB84-030-Q1-E1-G5
agcgcgtctggagcgctggagggtgcgcactacctcgcaactggcaagctggaggtgctttcggagcagcagttcgtcgactgtgaccacgagtgtgattcatcggagcctgattcatgtgattcgggttgcaatggtgggctaatgacgacggcattcagttatctccagaaggccggtggccttgagagtgagaaggattacccttacactgggagtgatggcaaatgcaagtttgacaagtccaagattgttgcttcagttcagaacttcagtgttgtgtctgtggacgaggctcaaatttctgctaacctcatcaaacatgggccattggcaatcggcatcaatgctgcctacatgcagacatacatcggaggcgtgtcatgcccatacatctgt

SEQ ID NO: 18611 - DNA, 410 bp, Zea mays
  Clone ID: LIB84-030-Q1-E1-G6
aacccacgcgtccgctgctgaagccgtccatggtgacgcccggcgcggaggccaaggacagggccaccccggagcaggtggccgcgtacaccctcaagctcctccaccgccggatccccccctccgtgcccgggatcatgttcctctccggcgggcagtcggatgtggacgcgacgcagaacctcaacgccatgaaccaggggcccaacccgtggcacgtgtccttctcctacgcgcgggcgctgcagaacacctgcctcaagacctggggcggccagccggacaaggtcaaggcagcgcaagacgcgctgctgctgcgcgccaaggccaactccctggcgcagctcggcaagtacacctccgacggcgaggccgccgaagccaatgagggaatgttcgtcaagaactac

SEQ ID NO: 18612 - DNA, 398 bp, Zea mays
  Clone ID: LIB84-030-Q1-E1-G7
aacccagcattaaatctctgaaatttgggaggtttcttggatgtggattcctgctgctcgctagggttgtcgcggtgacgttctgcgtcacgctggcggcgtccctggccgctcgctatggacccaccgtcatggcaggcttccagatctgctgccagctctggctggccacgtctcttctcgccgatggattggccgtggcgggacaggcggtgcttgcaagcgcgttcgccaagaacgacagcaagaaggtcgctgccgcgacatctcgtgtgttgcagctgagcattgtcctaggcatgggtctcaccgtcgtgctgggacttgctatgaggttcggggctggcattttcacaagtgacgtgcccgtgatccaagtcattcacagaggcatcccg

SEQ ID NO: 18613 - DNA, 400 bp, Zea mays
  Clone ID: LIB84-030-Q1-E1-G9
agtattgagaagtgtcctctttgtccgaactacaagcttgtttatgattgcacatcaaaggaatgcaagaccagcggatctagtatttgcagagggtgtgttgtttgcatctctagatgtttgcgatgtgggagatgtatcgacagtgagtttgaatttgaagagacattttttctggggagcatttgccgtgactgtgtcaagtattcaccccaccacagaaaaatagatgtttgattctgttatccattggatggatacagttgtaacattggatttctgtgattgatgctcccatccatcagacatcttgactgagtatttctaacaaggaaaataagagagaaaggtctaccagtttgctatcggtgtaggtgcagcagctgatatattgtttttg

SEQ ID NO: 18614 - DNA, 427 bp, Zea mays
  Clone ID: LIB84-030-Q1-E1-H1
cgtccagagcaagtcagctacctccatcaaccagaccagaccaggaccaatggccctgcgcctaccaatctcatcgtcccacgggctggcctccacgccggcgccaatctccacgacgacgtgccggccggccgtcttggcgacggccgcggcccagaagaggagcctgctgctggcgacggcctccgagacgaggggagtcgcgccggtgaggtccagcgggatcgagacgagcacggtgggtctgggatgtgaggccgtcaccgggcaggtcacggaggtcaacaaggacaccttctggcccatcgtcgaggccgccggcgacaaggtcgtcgtcctcgacatgtacaccgaatggtgcgggccttgcaaagtgatggctccgaaattccaggagatgtctgagaagaacctggatgttgtgttc

SEQ ID NO: 18615 - DNA, 379 bp, Zea mays
  Clone ID: LIB84-030-Q1-E1-H10
agtgccaactttttctataactgccctgataatactttccaaattgctatggctggaaggtcattctcacttctgcagaggattggagcttttgtgaggaatggtataaagcttttggcagtgggaactactgcttctttgattggcactagtgtcacgaatgcagcgctcaaagcaaagagggctgttgataaggaccttgaggacgaagtcatggaaattccagtcgtctcaactagtgttgcctatggtgtatacatgtccatttctagtaacctcaggtatcagcttctggctggtgtgatcgagcagaggatgctggagccgttgctgcataaccagaagctactgctgagtgcaatgtgcttcatcgttcgta

SEQ ID NO: 18616 - DNA, 407 bp, Zea mays
  Clone ID: LIB84-030-Q1-E1-H11
cccacgcgtccgcggacgcgtgggctccaccttcctcgccgcctcactccctctgaggtcgcagatccgtccggttagacgaagccgcccgcacccatggcctccggtgagctcgcctgcacctacgccgccctcatcctcagcgacgacggcatcgccatcaccgccgagaagatcgccaccatcgtgaaggcggccaacatcaaggtcgagtcctactggccggcgctcttcgctaagctcctggagaagcgcagcgttgaggatctaatcctctccgtgggatctggtggtggcgctgctccagttgctgcttccgccccagctgggggtgctgcagctgctgctgcccctgctgcagaggagaagaacgaagagcccaatgacgagtctgatgacgacatggg

SEQ ID NO: 18617 - DNA, 190 bp, Zea mays
  Clone ID: LIB84-030-Q1-E1-H12
gcgtcaacggacacgtggggtggtcagctcctgcggccacgatcggcccgtcggcgccatcggattaaagaggcgccaaaacatgggaacgatcagcgccgtacccgagatcagggatcgccacatcactagcgacgacgacgatattttacgcaacaagctcgaggttctgcctcgcaagatcgtcagc

SEQ ID NO: 18618 - DNA, 412 bp, Zea mays
  Clone ID: LIB84-030-Q1-E1-H2
atggtaaaataaaagagcggaaaattatatacattctgacagtttattatggcatcgataattcattctcgggcttgtttccacatgttgcacagtggttgcttgctgtgcataacactcagatactcttgagtgtatttttggctatattagcactgctccttggtggcttttgtgcttaccatgcacatctttgtttgacaaatacaacaaccaacgagacattcaaatggcaagactacatcatgtggatgaaaaaggaaaatgaagcaaaggcggacgctgccacgctcagatccagcataggctcggccaatagtgatgcacagaaagctcctccaagcaaatggaggacgttcttcatgagattccgcacaccaagcatggaaccagttgtgagaaacaacatata

SEQ ID NO: 18619 - DNA, 422 bp, Zea mays
  Clone ID: LIB84-030-Q1-E1-H3
acgcgtccagtttatatcataattgtgaaaggcattgttatcagcctatattaccatggataaatggtgatggtagtactaatagcactctctatgaaggtttaagtcgccgagttattggttatgtcatgcactatccaggactatcggaggaagatgttatccgtaggatggatgtattgaatcctcagacttgcaggaccctgctagaaaagctaacgctcgatgggaaccttcatgttcgggtttttgaagaacctgtgccaatggctccgaccacactgcaggatccagacttgtgagggcatcaagatttggaatgtttaaatgttaccgtccccagaactggtaaggccatctcgtggtaagaccatctccgccgtgtaaatagtcgtgcaaagtactattttgcacctgtttgc

SEQ ID NO: 18620 - DNA, 381 bp, Zea mays
  Clone ID: LIB84-030-Q1-E1-H4
acccacgcgtcaacgggcccctgtgggaagcagcaccatggccctctcctccacggccttcgccggcaaggccgtgaacgtgccgtcgtcgtccgccttcggcgaggcccgcgtgacgaggcgcaagacggcggcgaaagcctaatcaggagcagtgtccggaatcccatagtatcgacacgggcgcctgctgtacctgaggtcactgtctgagctagtcgctttggcgacgcagtcgggctacttcacaggcgactcctattgggacacaaacgggctgatcgctgtgatctgggaggtcaccactcagcgggagcaggaggttatccattcccgctgggccatgctgggcgcgctcggctgcctcttcccggaactgct

SEQ ID NO: 18621 - DNA, 393 bp, Zea mays
  Clone ID: LIB84-030-Q1-E1-H5
acggacgcgtgggcgcgggtggaaggaccccttcgcgtccagcgcctggaccgtgcgccagaaggcctacgtggaggcgctccgcctcgacacgctcttcacgccgcaggtcgtcctgcagggccgcgcgcactgcgtcggcaccgaccaggacgcgctcgcgctggccgtccgcgacgccccgcgctaccccgcgcccgccatcaaggtcacgttccagcggccgagccccgcaacactgcaggcgtcgttcacgggcaccctgcgcagccgcgtggagggcccaggcggcgcgagcgtgctggtggcgctgtacgagagcgggctggtgaccgactgcgggcgcggcgagaacaagggcaagtcgctgctcaacgaccacgtggtgcgccg

SEQ ID NO: 18622 - DNA, 411 bp, Zea mays
  Clone ID: LIB84-030-Q1-E1-H6
acccaagcgtcaacggaccccaatggcgagcatcacgatggccctctcctccaccgccgtcggctcagatctctgcgtgcgggctagcgatggcgtcgttctcggaggctcccccagggaacccgaaggcgggcgagaagatcttcaagaccaagtgcgcgcagtgccacacagtcgagaagggcgccggccacaagcaaggtccaaacttgaatggtctttttgggaggcagtcgggtaccaccacaggctactcctattccgcgggaaacaaaaacaaggctgtgatctgggacgagaacactctgtatgactacctgcttaaccctaagaagtacattcctggaaccaagatggtcttccctgggctgaaaaagccgcatgaacgtgctgatttcattgcgtatctga

SEQ ID NO: 18623 - DNA, 410 bp, Zea mays
  unsure (1)..(410): unsure at all n locations; Clone ID: LIB84-030-Q1-E1-H7
agccacgcccccacaccaagccgtatcgtcttctccctcttgtccggttcgggtggtccgcggtcggggtgagtgagtgagcagctttgcttctccatctccccgttcccttccctccccagccccccggcccggcggcggtacgtgaccctgacgccgcagcgctagctagctcgccggaacggcaggtggcggcgcgcgacctgagagcacagcagcaccggaccggctcaggcaggcgaccggcagaaaagatggcgggagcagcagctgtggagacggcggcggcggcggcagcggccaacggaaaagcgtgctgccacgccgccaaggggcccgggtacgccacgccgctggaggccatggagaagggccccanggagaagctcgtctacgtcacctgcgtctac

SEQ ID NO: 18624 - DNA, 385 bp, Zea mays
  unsure (1)..(385): unsure at all n locations; Clone ID: LIB84-030-Q1-E1-H8
ggggagagcgcaagctctgggataagctgttggaggaagcaaaggtcaacgttaccccaggttcttcttgccattgcattgagcctggatggttcaggtgttgcttcacaacattgattgaggaggacattcctgtcttggtggaaaaactgaggagggtcacagatagcttcaaatccaaacgttgaaacgctagaatagtttattttttggaacccctgcggtatcgaaataaccatatctcaccaggtgctctatagtggattgcagggggcactcaggaaaaggttggacaatctatttattttagaccatanatattcaggggcttcttgctatacagctgcataacaattgctggaagcccctaagctggtggaaggat

SEQ ID NO: 18625 - DNA, 389 bp, Zea mays
  Clone ID: LIB84-030-Q1-E1-H9
aggagctgctggttctggtaggctcggacatggccgtcaatctagcatcctgggattttctctgacctcaactgaatatactccaagattgatcaaaaactttgatggtatcaagattaaaaagatagctgcaggaatgttgcactcagcttgcattgatgaaaaagggatttggaagaccgaacgaagaattcagaccaaatattgttgaagagataccattttcagaagaagttgcttgtggaggttaccatacttgtgttgtaacagatagcggtgatctgtattcttggggttcaaatgaaaatggctgccttggtctgggaggtacggatatggtccgctctccggaaattttgaaaagttctctatttaaacttcctgtatct

SEQ ID NO: 18626 - DNA, 416 bp, Zea mays
  Clone ID: LIB84-001-Q1-E1-A9
cacggaaggggaagaaggcgtggcgcgccaacatcggcaccgacgacattgacgattttttcgagaagcagacgcgcgatgcccacgcgggcaccgccgccatcccttctcttccttcggactcgctcttctttgtcgacaagcccgccacctccgcatctacttccgccgccggcgcctcggacacaaccaccaaagatattcctgtcaaaaggaagatcgagaagaagagggagaaggttctttatcatgagagtgtactgaagcggaatccgtttgtgcagccaatcccatcttctgtgccgggcaagaaggataagaagataaagaagaagaaattgcaggagacacagggagagaaaagtgttcctatgggaaatggatcggtagttaagaactttgacatctgggctgtg

SEQ ID NO: 18627 - DNA, 82 bp, Zea mays
  Clone ID: LIB84-001-Q1-E1-B5
cgttggtcgacacaacactctatagtgagtcgtattagctacaccttaacaaacttgatataaaccatttatcgccctgaac

SEQ ID NO: 18628 - DNA, 424 bp, Zea mays
  Clone ID: LIB84-001-Q1-E1-B6
cacggcgccgcccagagcggcggcggcggcggtacggcggcggcggcgtccaagatggagagcagcccgaccagcaccaccatcatcggcgaccatgccagcgacgacgcgctcgaccacatcctgcagtacatgggcggcggcgacaccaagccggcgctgctgaaccaccacaaccaacacctcgctgccgcggcagatgctactactactacgaccgccgcgtgtcctgccgccgccacaagcgccggcctctacgggaacaacaagttcatgaagctcccgcccctcgagcacgccggcggcgggctgccgccgagcccggggccgtgcgagtacggcgcctcggggatcgccgactgggacgccctggaccggctcgccgcctacgagctcaacggcctctccgacgcgttcaagaaca

SEQ ID NO: 18629 - DNA, 356 bp, Zea mays
  Clone ID: LIB84-001-Q1-E1-H5
aacaccctgtagtgagtcgtattagtttttgaaattggcaagtatagtcaagcttcttcaggtgggttctcaatgggccctagtggtggcaacgacaaatcaaacagaagagttgtcagagttaagataaggaaatgaaataccaatactgttcaagttgctctgagcatttataatactaaggcaatcagcacgtataactttttgtttcacatcatttgtctgcggtggcaatgacaatgagatgccattcttaaattggagattacacttctggcacagtagcaacattggaactagccttttcgtgatactgtcgcccatgatattttgtcgtacggtttgccacaacaatg

SEQ ID NO: 18630 - DNA, 423 bp, Zea mays
  Clone ID: LIB84-003-Q1-E1-A4
cgcaccaccctaaagtgagtcgtattaacgcgtgggtttcaacaaaagagagcttgttaaagtgtgagaaactttcagtgagcgccttctgcaggcggagacttgcaacagttatggtgaagctcaagtttgcagagcaccttaaggaggctgtgacgtacatcgaacaggggcatgtgcgtgtcggtccagatgcagtcacggacccagcctttcttgtgaccagaaacatggaggacttcatcacctgggtggattcctcaaagatcaagaggaaggtcatggagtacaatgatgcattagagtattatgatgccatgttctgagaaaatcattcggcagaaatttatgtgcccgtcagtagtgtaatcttaagcctgccacaaaggggtcgtttctgaagaaatctgtgggaattgtctt

SEQ ID NO: 18631 - DNA, 264 bp, Zea mays
  Clone ID: LIB84-003-Q1-E1-D10
cgcgttggacatcgcaacaccctaaagtgagtcgtattaagcatcgcgctcaaccccccgcccccgccactcccgacgcgcgcatcggtcttcttggcaccgcgtcagatcccaccctgccgctctctagtccgcagcaagcgaccgccgcggcaaggcgtccgatcatccacgtctccgcagctagagactgccaacaccccgtcgccgccgtcttcgaggcaggaggccgtctcccatgcacggtcctgctctcgccacggc

SEQ ID NO: 18632 - DNA, 353 bp, Zea mays
  Clone ID: LIB84-003-Q1-E1-G6
actcgtagtacatcgcaacaccctagagtgagtcgtattactgtcgtacgacgagccaagaacggtgttcccgggcgaggcgtgcgacgacctcggcggcgagttctgcgaggcgccataccaggccggcgtctcgagggagctggcgcacgcctgagcctgatgcaaattcgcatccatatctgtctagaaccgagttggtctcggtagatcatgttagtcgggtagagatgttcacgccatgtaaggtatgtgtgtagcagtctagcatatgaccaagcaaggccaacggtgtatgtaatgtatacaggcatgtagtagaaaccaggatgaaatggtactggtgtgattca

SEQ ID NO: 18633 - DNA, 341 bp, Zea mays
  Clone ID: LIB84-003-Q1-E1-G9
aagcgactacgaccacagcgtcgcggacatcatcagcaacgcgtcctgcacgaccaactgcctcgcgccattcgtcaagatcttggacgaggagttcggaattgtcaaggggaccatgacgacgacgcactcgtacaccggcgaccagaggctgctggacgcgtcccaccgcgacctccggcgggcccgcgcggcggcgctgaacatcgtgccgacgagcacgggcgccgccaaggccgtggcgctggtgctgccgcagctgaaggggaagctgaacggcatcgcgctgcgggtgccgaccccgaacgtgtccggtggtggacctggtgatcaacaccgtg

SEQ ID NO: 18634 - DNA, 405 bp, Zea mays
  Clone ID: LIB84-004-Q1-E1-D10
acaacactctaaagtgagtcgtattacactagctcgccccctcgttcgccgcctctcctgctcctaccgcagctctccctcaggtttagtgttcgcaatggcggccttcaacaagcttggtggccttctaaggcacagtgctctggtgagcggtatcactggtggctcttctcctgcagtgttcaatgctgcacggctcatgtctacgaagctagttattggtggtcttgactggggtgttgatgacgtgaaactaacagaagcatttagcaactttggagaggttactgaagcgagggtgatcacagacagggagactgggatgtcaagacgctttggccttgtgagacactccgatagtgatgctgcgaaagaagcgatttctgcagatggatggccaggaaa

SEQ ID NO: 18635 - DNA, 387 bp, Zea mays
  Clone ID: LIB84-004-Q1-E1-E8
tcgggtccacgcatacgtcagattgcatcctctacacaggacacccttattattttattgtgtttgtcaccacacatttccaaaccatacatcaacaatatttaatgggcatttctcgaccaataatatcgcattggtactcccacttacatttacacacataggcaagctcctctcacgcaatagagtctacaagcatgcaccggattacatcgtctcgatgctacacctatttcactctacagctgaatatggatatcagatcgacaaatctgttcatgatttgtggacgatgtcttcatgctctgtacgcatacacgatgatattacacggtgcggtgtcttgactctaacatgtcagttgtcgaaactctgctctgttctcac

SEQ ID NO: 18636 - DNA, 73 bp, Zea mays
  Clone ID: LIB84-005-Q1-E1-E5
tgagtcgtattaccctccggttccggttcgggttcgtgatgttctccggggttcggtttcgtgggtgggcgga

SEQ ID NO: 18637 - DNA, 409 bp, Zea mays
  Clone ID: LIB84-005-Q1-E1-G5
aagcgatccgaagctcaatcaattcactcaaacctcttccccaaatcttcgattagattctcgttgacaagaagactagaaccgaacctgaccatgtcgctgatccgccgcagcaacgtgttcgatcccttctccctcgacctctgggacccctttgagggcttccccttcggctccggcagcagcagcagtctcttcccctcgttcccgcggaccagctcggagaccgcggccttcgctggcgcgcggatcgactggaaggagactccagaggcgcacgtgttcaaggccgacgtaccggggctgaagaaggaggaagtcaaggtggatgtccaggacggcaacgtcgttcagatcagcggcgaacgcaacaaggagcaagaggagaagacggacaactggcaccgcg

SEQ ID NO: 18638 - DNA, 312 bp, Zea mays
  Clone ID: LIB84-006-Q1-E1-B10
cgtcaaagtcgcttttatatatatgcagccatagaaatagggaccagtgaaaaatgacatggtaatcaacttcttgcccacagttgtattcagaagaagacaacgaggatacacgagatattccgaagcatatagcttcaaattagcagctgagggaatcatgtccatatcgagacgagtattcttatgcaatacatatagtttctgctgctgtgccttaatttgataactcgatagacatccatcttcaggtagcaggcaggggtacatgtatgtgataccgcaatagtaatgagaataaacatccacttg

SEQ ID NO: 18639 - DNA, 327 bp, Zea mays
  Clone ID: LIB84-006-Q1-E1-B4
atcatatatccatccatatatatgcaagggcaaggctcgagatacatggtgtttatgcgcgagctgggcacatgtatcatcgatcccagtatcccatgcatgcagatgcagctcgggggcacatcacgagacatgggctgcctctctcgcgcgctcatgagctactaccgatgtacttgtccataagggtggtgagcgtggacttggggacagcgccgatgaagctctccttcttctcgccgcccttgaagatgagcacggtggggatgccgcggatgccgtacgtggatgccacgttggggctgtcgtccgtgttcaccttgcagc

SEQ ID NO: 18640 - DNA, 259 bp, Zea mays
  Clone ID: LIB84-007-Q1-E1-C12
ctcgctggtcgacgcaagtctctatactgagtcgtattatccagtcgaggagctcgagggcaccaatcatagtcggcgtgaactccagcgtcgtcgggctcaagcccgccgcggcagtgccgcatgccgccgccgcctcatcgccggcgaagcgggtgcagctggccgctcccgacggccgccgcgccgctctgctcggcctggcggccgtcttctccgtcactggcacgacctggtctgccaacggcacgatcttcga

SEQ ID NO: 18641 - DNA, 409 bp, Zea mays
  Clone ID: LIB84-007-Q1-E1-E9
gacggtcgcctcgcagtggcaagtgcccgagcgatgcagcagataatcagcgcctgcaagctgcctcacacgcaacgggccgccgcgctcctgccgcagaggccatcgctcaggcgccttccagtcccaggaggtgcgccgccgccgcggcgattggtagtcaggaggagatgccaggaagaggataagcagcagcaagaggccgaggagggaagcggccctgactagcaggagcaggagcagcagaagcgaacgttcctgagcctgtaggaggccgggctggtggagatgtccggcctcagcacgcacgagcgtttcctctgccgcctcaccatatcgtctctgaacctgctgagagtgatctcggggcaggagggcgtcccgataagaggagctcaacgccggggcg

SEQ ID NO: 18642 - DNA, 429 bp, Zea mays
  Clone ID: LIB84-008-Q1-E1-D3
tgcggcgtcgccctctcacagccgcgcgcgcttcgctacatccgccagcgccgagcccaaggaagcagatcttcagtctaaaatcaccaataacgtgtattttgacataagcattgggaaccctgtggggaagaatgttgggaggattgtcatccgcttgtatggggatgatgttccacaaacagcagagaactttcgtgctctttgcactggagagaaatggtttggatacaacggatccagtttccaccgtgtcatcagcgactttatgatccagggcggagattttgacaaaggcaatggtaccggtgggaaaagcatatatggacgcactttcatagatgagaacttcaaattggttcacactggacctggagtggtcagcatggctaatgctggaccgaaaccaacggcagccagtttttcatt

SEQ ID NO: 18643 - DNA, 357 bp, Zea mays
  Clone ID: LIB84-008-Q1-E1-G6
ggattgaaaacttcctcgagtgccccacctgtggctgcgggttcgactgcaacaacctgctcatgctgcagaagcccggcgccgccaccgccaagctgcgcctgcggggtgccttctagaactccacttctgcagatttggtgactgctgctgtaagctgcctcgactagtagtgctgtatgtctagtagatgtgggttaataaagagggcaaacttgaaagatcccagcttttagatgtgggatggggtaaccaagttcaggactcgatgtcatgtttcaccaattgtttcagacagttctaggaacagtcagagaagcagttaagactttcagatattttatttatacgtctcta

SEQ ID NO: 18644 - DNA, 407 bp, Zea mays
  Clone ID: LIB84-010-Q1-E1-D7
tattttcccaactgctgcagatgattgaaggatgccttccttattatgataagaaaaatgatgaaattgagaaggcacataattctaaagaaaggcctccttttcgagctcctccaaagcattatgcacatgggttaagagagtaagcactcattgtttcccctgtatagtactccctccgttttttttatttgtcacgttttagtttaaaaataaactatcggacgacaaatatttaagaacagaggtagtagcaaacactcttgtgtcttgctatgcatttcaaacttttagcaaacaactttctgcaagtaatgctcaatttaactacttgtatttgtgaaaattaacgtgttgtatttcctccacataccattattgttagtgattttccctttggtaatttc

SEQ ID NO: 18645 - DNA, 392 bp, Zea mays
  Clone ID: LIB84-010-Q1-E1-G10
tagcaaccggtccagcactttcacgctcagctccagcaatggctgcctccaccatggcgatctcctccacggcgatggccggcacccccatcaaggtgggctccttcggcgagggccgcatcaccatgcgcaagaccgtgggcaagcccaaggtggcggcgtccggcagcccctggtacggccccgaccgcgtcaagtacctcggccccttctccggcgagcccccgagctacctcaccggcgagttccccggcgactacggctgggacaccgccgggctgtccgccgaccccgagaccttcgccaagaaccgcgagctggaggtgatccactcccgctgggccatgctcggcgcgctcggctgcgtcttccccgagctgctctcccgcaac

SEQ ID NO: 18646 - DNA, 329 bp, Zea mays
  Clone ID: LIB84-012-Q1-E1-B11
cgcgcgggtcgacgcaacaccctacagtgactcgtattatgaaatcgttcagcggtcgccagaaaggcagagaatggtggacccagtgcctcagagagctcacgatcggccacggtacagtgaccggacccgctatgtgaagcggagggagaaccaatcttaccacagatgaagtctccgtttctggagatggaaaatgccagggtttccacaggtgtgccatactggacatgcaggaggagcccccactacccacatgcgaatgacatccggtcgggtttgcctgcgcgttcgaagcctgacaagttgacattgcgtacgcctttggg

SEQ ID NO: 18647 - DNA, 436 bp, Zea mays
  Clone ID: LIB84-012-Q1-E1-B9
cgcgtgggtcgtcgcaagactctatagtgagtcgtattaacgcgtgggcggacgcgtgggtttttttttttttttgccataaccaaaatccttctgagtccgagctattagcctaaagagtgctggcatctaactaacagcctaattgacatggaagatgactcacatataaaaataggattcatgtattcagatagcacaaagtccatgtacacagatactgaaccaattgatacggccaaaggaagttccatagatagaagtcagctatattacaccttcgatttcttcgtgtgggcctcaaacagtcaaaccccggaatctgcagcactctcactttctcctactagttgaggagccacctgatgcctttaaccgggcatgtcgcccctctagccttgcttgaagtaattttgccttcaggggtgttctcatc

SEQ ID NO: 18648 - DNA, 75 bp, Zea mays
  Clone ID: LIB84-012-Q1-E1-G9
tcgcaacaccctaaagtgagtcgtattaactgtctacctagactgcgcacttcgtcagcgtgttcagcagattcc

SEQ ID NO: 18649 - DNA, 116 bp, Zea mays
  Clone ID: LIB84-012-Q1-E12-C7
atagtgagtcgtattaatgcggtgtcggacttctctactgacggttcagtctctgcgtccccccgtgtgtcttcgcgccatcaccgacgtgttgctcacgtgcacgtagtggtgtc

SEQ ID NO: 18650 - DNA, 219 bp, Zea mays
  Clone ID: LIB84-012-Q1-E12-G4
cgtcacaacaccctaaagtgagtcgtattaaagcaactgggtacatacactgcgcacttcgtcatgtacttcccaatatgccactggaacaaaggagacaacttccagtcgacctgcctgaaggacatctcaaagctctaagcccgcaaaccttgggtcaaggggtagacatgcatctcggcttggctattgatagtccagaggcgacattagcagtca

SEQ ID NO: 18651 - DNA, 334 bp, Zea mays
  Clone ID: LIB84-013-Q1-E1-B5
aacggcctcagatgcgtcggggtgatcgtcaagaacgaccgggcaagagcctctcatgggtccaagacgaagatatcggaagtgatgacatctccagctatcacactatcgtctgacaaaaccgtgatggatgctgctgttctcatgctcaagaagaagatccacagattaccagttgtaaaccacgacgaagaagtaataggtagagttacccgcgctgatgttcttcgcgtgttggaaggcatgttgaagatttacgagcgcagatacccatgctcggaagccacagcctcgtgtacatatgtagatgttcccgggcatggtgtttctgagt

SEQ ID NO: 18652 - DNA, 101 bp, Zea mays
  Clone ID: LIB84-013-Q1-E1-C10
gaatgatagtccgggatttttgattttgttttggttcgattcaaattcaaatgtttgattcaagactggaatggccaaaattataccccactatggacaca

SEQ ID NO: 18653 - DNA, 395 bp, Zea mays
  Clone ID: LIB84-013-Q1-E1-D12
cacgggctacgccataatccgggagagcacctacttcctcgattctgtggcacccattgccaaagggatgcgatggagctgcgagaagcacagcagcgagaacaaggccgacaaggacaagatcctcgtctgccagaaaaagctttgggcaggaaagcagtgacgagagaggatcatccttcttccttccgagtataaaaaagtaggcatccagatcggccaacaaggcaagaggcgcttcaatacacatggaagatgagcgagtacttctgatacaaagagtgttcggcagttattatcaaaataaataagccgagtaaaactccatataggatccaacagttaccatttttcattaatcacagtttaattctttttctgtaccgacagtttgt

SEQ ID NO: 18654 - DNA, 436 bp, Zea mays
  Clone ID: LIB84-013-Q1-E1-F8
aagcaagcgcactactcctcggatagccacggcagcagcagcagccatggcttgctccgcgcaccttgtgtcccagagcctctactcgtcccaccgcgccagcccgggcgggcctaggaatctccgttcccagggccgaccgccggcgcgggcgtctccctctgcgaggcctggctcaagggtcagtggctgccggggtgtcagcctgagagtcgccgcgtcgttcgagcagggaaggaggcaagtggaggtctcttatgacccacaagcgaggtttaaccagatagcagaccaaattgacaaggatgctgggatgacacggcttaacctattctcaccttgcaaaattaatgtgttcttgaggataacgggcaagagaccagatgggttccatgacctggcttctctatttcatgtcataagtttgggtgatact

SEQ ID NO: 18655 - DNA, 426 bp, Zea mays
  Clone ID: LIB84-014-Q1-E1-A7
acaagcctctatagtgagtcgtattaggatcagccatgcctgcgcttctagtgaacaccgtctcggtctctcccgccgcctcaaggctaggctcctcgcggcccgccatggcacggcgagcagcaagcgctcgccacggccacaggtgccgagccgaagcatccggtagctcgtgggtgtcggactacgacctgtacgagctgctgggcgtggagcggtcctcgccgcagtcggagatcaatgcggcgtatcggtcgctgcagaagcggtgccacccggacgtggccggcgccgccggcggccatgacatggccgtcgtcctcaacgaggtgtacgcgctgctctccgacccggacgcgcgtctggcctacgaccatgatcaggcgcgccgctccgagttcgccggttacacggggccgccgctct

SEQ ID NO: 18656 - DNA, 360 bp, Zea mays
  Clone ID: LIB84-014-Q1-E1-D11
aggacaaaatgtatcctgtatctatatggtttcaatgtgtgtctgtactgaactgtacaagcttatcgagcaagatcactgcaagtctacaacaatccacgcccaacacaggcggtggacacaacccatccaataatctttcatgagtacagtgtcggagtcatcggccaatttcctcaaaattatcattaatttatgatgttcatgtaactatagtcgtaggataaggcatggccggtttggtttcatcacgcggaatgggagcaccttcttgacgatctcatcactgagcgaagcgatctgggcgtctagcgccttgacagcctcccccttctgcgcctcgaggttggcgagcgcctc

SEQ ID NO: 18657 - DNA, 399 bp, Zea mays
  Clone ID: LIB84-015-Q1-E1-C2
ctcgcggatcgacgcaagcccctaaagtgagtcgtagtacgacgatcacacacgcagaagatcgagttcgttcgatcgtgaccgtgacgcatgaagctataagctagccaagacaggaataataatggcggcgtcgacggtggcgagcctctctgtcccggtgacgacgacgaccttcgcggcggcggcggcagcgggcggcgccgacgtgctgatcgtcgtcccgaggagggcgggcgctgggcgcgtctggttccccgcggcggcgcgccgcggcggcggcagccggcggttggtcgccgtgcggtccagcgggccggccacgccgccggagatctccgacaaggtgtcggagagcatcaagcaggcggaggacacgtgcgcggacgaccagaaggg

SEQ ID NO: 18658 - DNA, 427 bp, Zea mays
  Clone ID: LIB84-015-Q1-E1-C6
taaagatgagaatggtgatgaggcgccatcgaaaaaggcccaaatggttgtccaagttgaggctgtccgggtgcaaaaggagcttgcagcgactgagattgatggttattgtgaaggcgaactaatcaaggttacactttctggaaaccagcaacctattagagttgaaatcacagaagctgcgatggagttgggtgctgaaaaactttccgggttggtcaacgatgcttacaaggatgcacaccaacggagcgtccaggccatgaaagagacgatggctgacttggcgcagaccctgggaatgcctgcggccctcggcatggtctccaattgatccgcaattcgggaaagctttcaattctcccttttcctcaattttgtatgccagccgtgtgaattctaagcaaaacccctccgcgacctctca

SEQ ID NO: 18659 - DNA, 374 bp, Zea mays
  Clone ID: LIB84-015-Q1-E1-D2
acaagcccctacattgagtcgtattaggagcttaagtttgtcaaagacatagctgcatcaacaggcattgtccttgatccagtctacagtgggaaggcggtttatggattgctaaaagacatggctggcaatccaaccaaatggaaaggtcgaaaagttctgtttatccacacaggtggtcttcttgggttgtatgataaggctgaccagttgtcatctttggctgggagctggcgcagaatggatcttcaacattctgttccacgcaaagatggcactggtaagatgttctgatcagtatggtccatgttattccatgatcgctcattcttgcagacattgtatccattacagagttgttactcctacatttg

SEQ ID NO: 18660 - DNA, 440 bp, Zea mays
  Clone ID: LIB84-015-Q1-E1-F5
cacggaagcgtcaacaccgaccccatcttccccagcaacaagctcaccggcaccgacgtcgggtaccctggtggcctctggtttgacccgctcggctggggcagcggctcgccggagaagatcaaggagctgcgcaccaaggagatcaagaacggacgcctacgccatgctcgccgtcatgggcgcctggttccaggccgagtacaccggcaccggccccatcgacaacctcttcgcccacctcgccgaccctggccacgccaccatcttccaggccttcacccccaaatgaggagttgaacttattattagcattttgaggagtgctaccacacatgcatcgtcaggttgatggccgatatatatgaaacttcacattttttttggtggggaaggactgctgagtagactgtcaatgatggaatgctcgtggtgcgagt

SEQ ID NO: 18661 - DNA, 269 bp, Zea mays
  Clone ID: LIB84-016-Q1-E1-C6
ctcgcgggtcgacacaagcctctacactgacgtcctgataccatcgagaagcacggcctcgacgccgtcgcgcgcaaggccggcatcgacctcaacaagaagtgagcaagaagtgagcccatccgatgagcagccaaactagtgtggggtggcactagcttagcattcacgttcgcagggtcgtctcgtctgtctgtctgcctgcctgcctcctgctgttctttcgcaatcaaaccatatcattatatttcctcccaagacagaaagag

SEQ ID NO: 18662 - DNA, 406 bp, Zea mays
  Clone ID: LIB84-016-Q1-E1-F5
aagactctaaagtgagtcgtattagccgccggcgaacagagagcagcgagcaggtcgacgacaagccgtagcaaaatcattgtttcctttcatgcatccatccatgcgtaatccacatgaaatcggtgcgtatgataatcctgcaatgtcggcgtcgaacaaggcagcttttgtagattattttttggcaagtgagctattcacctgtgtaggttcattcaagagagagtctgtgcgctgacgtgctgtctaggctagatccgatcagcgatgatccgaataagcagctcgtccttgcctgtcagcccccatgcggccatgctccccgtggtccgtggatggagttcttgaaaggttgctgagaaaacatgcctgattcgcagagacctggcccggcatggcaatg

SEQ ID NO: 18663 - DNA, 354 bp, Zea mays
  Clone ID: LIB84-016-Q1-E1-G3
gctggaatggttctacgtactcgtcattatcattaccatcttagatgcaacaactgaattacggtcgcatacaaccacggtcttaagcttcgtctgcaccaacgcatgcatagatcgatcgaactcacgggtcaggctgaacaaaaatacagtcgtagctaggaataatcgacggatgagttcagagcgagaggccggagtcgtcgtcctcgtcgagcgtggaggtgtagacggtgtagagggaccagatgaggccgaagacgcccagcaggatccaccccagcaggttgttgctgagccccaggcttagcccggtgccctccgtcgacatccgctcgtccaacaacgccagcg

SEQ ID NO: 18664 - DNA, 100 bp, Zea mays
  Clone ID: LIB84-016-Q1-E1-H9
gttggtccttacaattccctataatgagtcgtattacgaactcgaactgctgctgtgcagctatccactctccagtgctccacgctctccaattctctct

SEQ ID NO: 18665 - DNA, 181 bp, Zea mays
  Clone ID: LIB84-017-Q1-E1-G8
cgcgctggacgtcgcaacaccctaaagtgagtcgtattaagcacttgacgatcagatcgaatcgcacgaattcctctctttgggggtagccgcgtagcgcccgctcagtcgccggcgaccacggcggagaaattgcggggtcacctcgcctgtgtgtcgtgattacgcgagggagcgagcg

SEQ ID NO: 18666 - DNA, 343 bp, Zea mays
  Clone ID: LIB84-017-Q1-E1-H3
aagcggtccggcggcgtcacgtacgtggagggcatgaacgcctacagcggcctcaaggggctcaacaaggtgaacatgctcggggtgcgcaagaccgccgactactccttcgccaaggtcgtggcgtcgctcagccccgcgggcaggaagcggcgcggcggcgcgttcggcgcccagatgaacgccgccgccgagatcttcaggatcgccgccaccatgaacgggctcgtgctcgtcggcgtcgccgtcgggttcgtgctgctccgggtggaggccgccgtcgaggagtccgagtaaggtgcgtgggcctgccactgtcgggtgtcgccccgggccgcagtct

SEQ ID NO: 18667 - DNA, 173 bp, Zea mays
  Clone ID: LIB84-023-Q1-E1-B12
ccgggccgacccacgcgtcaacagaacccagccgcaataatttgttagctaccgaatgaatgatggtctacgcttgttgatgagttggtgctttgtcgtggttttgtggatgtaataattcgatgtacaaataaaaaaaggggagacaaggtgcttgttcccttggtttggtg

SEQ ID NO: 18668 - DNA, 316 bp, Zea mays
  Clone ID: LIB84-023-Q1-E1-C1
caatcacatccaatccatttggtgtaggaataaccgaacaaggcctaatggttaccacacatttgttcagaaaaccgtccaaagaaatgacatagtaaaatatttttaacagcacagaagccttgttacttaacctacacaggatttgctggattaacacgacacgaatgcaccgttccaaccaaataaaccttcctcacatactgacctgttattatcaacattcacgctacagaaaagctcaaattttctccactgatctgactcctttcccctcaagcttctccatcgctgaagccaaataattgtcccaata

SEQ ID NO: 18669 - DNA, 366 bp, Zea mays
  Clone ID: LIB84-023-Q1-E1-E11
cgggccgacccacgcgtcaagaggaggagctccagaaggagaacatcaagaacgccgcctcctccaccggcaacatcacgttgagcgtcaccaagagcaacccggagaccggcgaggtcatcggcgtcttcgagagcgtgcagccgtccgacaccgacctcggggccaaggcgcccaaggatgtcaagatccagggggtctggtacgctcagctcgagtgattcgagtgtctaactgctaggtgtccgaccgccgtcatggatcttgggaaggtgtatgtataccatggaaaactttggagagcagaggaggaatcgtgtatgtaatgtacttgttaatgcaaattcgggctgtcgcgtttttaaa

SEQ ID NO: 18670 - DNA, 337 bp, Zea mays
  Clone ID: LIB84-024-Q1-E1-B9
cccacgcgtccgcggacgcgtgggcatcgacaacctcttcgcccacctcgccgaccctggccacgccaccatcttccaggccttcacccccaaatgaggagttgaacttattattagcattttgaggagtgctaccacacatgcatcgtcaggttgatggccgatatatatgaaacttcacattttttttggtggggaaggactgctgagtagactgtcaatgatggaatgctcgtggtgcgagtgcgatgcatggtgtacttgtactatgttgtaaccagtgtaaaaaggggatactcgttagatgttatgccatgttctctgaaaaaaaggagac

SEQ ID NO: 18671 - DNA, 176 bp, Zea mays
  Clone ID: LIB84-024-Q1-E1-H4
attctgaaggtcactctgtgtcagttgttaaagctgtgtacaccctcggctccagcagacccatgcatcaaccagcatggactgtggatccaggggtgctgttaccaccgtcaggctttattctaagttaaatcccaatgaaaaaaattgtgcttcttggtgctgcaaatcaaaac

SEQ ID NO: 18672 - DNA, 329 bp, Zea mays
  Clone ID: LIB84-024-Q1-E1-H6
acgggcccatccagactgtcaattggtaaccacgctctcatacgttacgaatctggggaagagccttgcattgcttgtaaactaggcgaagctatatgcccacgctcaagcacatacaattgaagctgaagaacgtgaatacagcagtcgccgaaccacaatgtatgatattgacatgaccaaatgcatttactgtgggttctgccaagaggcttgcccagtcgatgctattgttgaggggcctaactttgagtttgctactgagacacacgaggaactactgtacgacaagggaaaattgctcgagaatggtgaccgcttggaaactg

SEQ ID NO: 18673 - DNA, 409 bp, Zea mays
  Clone ID: LIB84-026-Q1-E1-B10
taggcaagaaggtgattgaccgcggtgagtttgttgatgagcccaagccacaacgttcagaacactgtgtatctctacttgccgagctcgacacattcagcaaccaacaagtccagtcaccttcaccatcaaatatgaaagagcttgccaagaggacactgaaagcataccttaatgtccggcgaggcgtcgagcagctgatgagcaagtacactgtgaaagcatgtgggtactgctctgaggtccatgttggtccgtggggccacaatgtgaagctctgtggggctttcaagcaccagtggcgggatggcaagcatggatggcaggacgcggtggttgatgaggtcatcccgcccaactacgtgtggcatgtccctgaacccagtggctctcctctcagatcctctct

SEQ ID NO: 18674 - DNA, 330 bp, Zea mays
  Clone ID: LIB84-027-Q1-E1-B10
agctaactctcttttttttcactctttactgtaatagtacacctcttgtccaaagaatcacagttcgttacatcggaagcagcatccgacttcgatcattcgaaagaattataccctcactcgcatacatgataatacttcgccaccttacattcttgaattgacggaacccagtcacacacacacacaccaatcagaggtctcaggaggctggccaggtcttcaggcacagcccgcctgagaaaaatgaagaatacgctacgttctatagtctgtgtcaatcagatttttgtgcagaggtgttcgttttcgagtcagtttggtagtaca

SEQ ID NO: 18675 - DNA, 402 bp, Zea mays
  Clone ID: LIB84-027-Q1-E1-D2
gggccgacccacgcgtcaagcatctggtaggcttctagagtatgaggttgggggtccccgtgtttgcgtgcagactgcatacggagtagaagttgaggtggaaaataacccatatgatcctagcttaatggttttcatggactacagagattgtttcaaagaggaattctcacacattgaacaagaaaatcccactttcctgtatgctatgcccatgtcatccacacgagttttctttgaggaaacatgcttagcttctaaagatgctatgtcttttgatctacttaagaagaggctgatgtatcggttgaacgcgatgggaattcgtatcctgaaagtttatgaggaggaatggtcctacattcctgttggagggtccttaccacacacagatcagaaaaa

SEQ ID NO: 18676 - DNA, 426 bp, Zea mays
  Clone ID: LIB84-027-Q1-E1-H3
gggccgacccacgcgtccagaccaccaggttggcgttgctggaagagaaggagctgtcggcggtgcttaaaacctgtgctcgacctactggcgtatccaggaagatagtacagcctgccgctgccaagtacagttatgcattccaagtccccagagaagcaatcacttctgggatcgaggagaaacccagcaaataatgggagtacggaggatgaaaagggagacggcgggatcccatggctgacatttctggggttcgtgttcctgatcttcaactcgggcatggcgatctaccgctcggagcgcgaccccgggtcaataacgttcgtgtcgggcgcgtacgtcgacctgctgctgctcttcctctgccttcgccggttcgagcggacgccgcctgactcgccgcgccggggggtggattaaggg

SEQ ID NO: 18677 - DNA, 285 bp, Zea mays
  Clone ID: LIB84-028-Q1-E1-B8
gcgtggtgatgtaggtattagtattacgaagaagttttattcaggtcacgagcttattgtcgtaattcgtacaggagctgagtgcgtgcacgtacgtacgctagccaagtacgatgaccctgcacaatcacagacatacataaggcacgcaggcaggcacgaacgggcgtggatgccggccgcccgggctgctcagttagccctggcgaggaagctctccctgcgctcgtggacctcgccggtgcaggtgttgatgtcctcctcgaccctggtctcgcgcaccac

SEQ ID NO: 18678 - DNA, 522 bp, Zea mays
  Clone ID: 03-LIB84-007-Q1-E1-A3
gagctacctagcaacgcgcagtaagcagcgtgggcaaagctacgagcgcccggctagcttcgccatgaacatgggtggggtgtccccgtcgacagtccggtgcaagcactgcagcacgcagctcaccgtgtgccccggcgagcgcgccatccagtgcacgcaatgctgcggcgtgacgcgtatccggcggcggcgggtccagcggccggcggcggcgccgcccaccacgggcttcccgcgcgcccgcggcaagaagcgggccctcctgatcggcatcacgtacgccggcacgcgccggggctgcggccagctgaggggggccctcaacgacgtcaagtgcatgaggcaactcctctggcaacgcttcgccttcccgagcgactgcatcatcatgctcactgatggacagaagggaccgttcaggctgcccaccatggacaacatccggttggggatgcacttggcgggtggaggggaagcagcgagggggaatccctcgggttccagttctccggcctgggc

SEQ ID NO: 18679 - DNA, 647 bp, Zea mays
  Clone ID: 06-LIB84-007-Q1-E1-B5
cccacgcgtccgggagacgaaagagaaatatgcaggcggtggcacgggcggcgcgtgggctcgcggctgcggctgcggctgcgcggccgtcggcgacggaggcagggcaccgcgggcaggtgcagcaagctcggggcatcgtggtgcaggtgagggacgggaatctggagcgggcgctgtcgatcatggagcgcaggatgcggtccagcggcatggagcgcctcatccgggcgcgcacccattaccacgtcaaggactcggagaagcgcgtgctcgcgcgtaaggggcttatgcaacgcgtccgttcccaggagctcggcaagaagctccgcgagattctcatcaagaagatcaggggccagtgagggcatcaacgcattggccgtttaccggtagcatttgtgtgtgggtgcttcgttttgagcgcgtaacaatgctgggtactttcatcgatggttctgtggcgcagcctgagaataactcaacctaccttgagcaaaaaggcttttgctatattgcatggaggacagattgatggtaaaactattgtttttttattggtcaacttagtatatatatggatttaattactgtttgtgcctgacctgtgtgcatgcaaatgctgtctgagcaatgtgtggcaatgc

SEQ ID NO: 18680 - DNA, 575 bp, Zea mays
  Clone ID: 07-LIB84-007-Q1-E1-B3
cacacgcgaccgcgtacgtacgtagatcgatccatcgatcgctagctagctgacgaccatggcgtccctctcctctgccgccatcaccgccccttccttcacggccgcgcccgctcgcgcagtggtcagcaggaggtccttcaccgtgcgtgcctctctccgcaaggccactgccaccgccgccgtggccgttgccgccagcgtcctgcttgccggcggcggcgccatggcccaggaggtgctgctgggcgcaggcgacggcgggctcgtcttcgagcccagccagttcaccgtcaaggccggcgacaccatcaccttcaagaacaacgccggcttcgcgcacaacgtcgtgttcgacgaagaccaggtgccgagcggcgtcgacgcctccaagatctcgcaggaggagtacctcaacgcgccaggcgagacctactccgtcaccctcaccggtgccgggcacctacgggttctactgcgagccgcaccaatgagcaggaatggtcggcaagattagagtcaactaaagctagctatccattccatgcatcgcgatttgtatgtacgccgcccgt

SEQ ID NO: 18681 - DNA, 343 bp, Zea mays
  Clone ID: 10-LIB84-007-Q1-E1-C5
cgcaagaccctaaagtgacgtcgtactaacgcgtgggcggccgacgcccacaaagcattgaagagaagaagagaagggacgccgccgcgcgagttcacgtggacgatggacagcgccgctcccgttatcgccaggccgtcgctgcccaagaagccctcgccgtcgtgccgcctccggaacggcagcctcaacgttctgcgcctgctccgcgtgttcgagctctgcgaccgccatggggatggcgagatcaccctcgacggagatggccgcggcgctcgacgcgctcggcctcggcgccgaccgccccggcctgcaggccgctgtgggcgagtacatcccgggc

SEQ ID NO: 18682 - DNA, 524 bp, Zea mays
  Clone ID: 11-LIB84-007-Q1-E1-C3
gtccacccagccgtccgagaaacaaatggctgcaatacctgcagcgatcccgggctgctgctcttcgtctcgcctgcctcagcttgctggcctccctgcctccacaagcagaaggcgcttcaaggtcacggccatggcgcccaaaaagaaggtgaaccgctacgacgagagctggtcgaagcagtggttcggcgcgggcatcttcgcggagggcagcgaggacgtgtccgtggacatgttcaagaagctggaacggctcaaggtgctgagcaccgtggagaatgccggcctgctgtccaaggccgaggagctgggcctgacgctctcctcgctggagaagctgggcctgctctccaaggcgaatgacctgggcctgctcagcctcgtcgagaccgcggcggggacgtccccgtccgtcctcgcctccatctcgctgccgctcctcgtggccgccgtccccgcggtggtcgtcgtgcccgacgactccgtcgcgctcgtcgccctacaggccgtcgtcgcggcgg

SEQ ID NO: 18683 - DNA, 78 bp, Zea mays
  Clone ID: 12-LIB84-007-Q1-E1-C7
ctcacaggacgacacaagactctacagacactcgtgaaaggtctgaaataatatacgaagggaaattgtttgtattgg

SEQ ID NO: 18684 - DNA, 542 bp, Zea mays
  Clone ID: 13-LIB84-007-Q1-E1-D1
tccacccacccgtccgcacacgcgaccggtacttctctgtcccagcgcctacttcctttgcttctacctcacggcgctcctgccccatctccggcgttcctccagctcgcccatggtggcgcgcgctgctcccctgcgttcttccctgcaattttcagccttcccgcgcgcgccctcctgctccctggccgtcgcgccatgccggccggagctcgctcggctgcagtctccttctccctcaaggtccctcgcgcccgccgtgctccggtcggagggggatttgctgcgcgcccatctaatcctgctcgggtcgtgttgagcaccatattgagcgcggacggtccggccctgaggccggacggtccgcggtccggacggtccgcgcttgtgggccggacggtccgcgcgtgcgcagaacagattaggggttccgagttttgtgctacggttgttagccaaaatcaatggggataagcccgaaaattagtttggtaagggtccagcccccctcatctatgactacataggtataccgccgattt

SEQ ID NO: 18685 - DNA, 391 bp, Zea mays
  Clone ID: 15-LIB84-007-Q1-E1-D3
gtgacaaaagaggcaagatgcaagacgagtccgtgaaggccttcaaccttgctgctactgctgttatcaacaagctgttgatactgatttatcagcatgtcctcactaaatgcagaatacggtgcagttccattgttttacgttgacccgaacattggaggaatcctcgagacagattaatgcaccagatattagattacctggcatcagtttgttgcctgtatttgttgtatgctactgtattgtttgtgccaacataaactaaatactgtttgagaatcagatgtgtatatatatagatagaaactttggaacgtcgtttggattctattctgcagaaatcaattgaactttagcatcatatttaaaaaaagaaaaaaaaggagaaaaa

SEQ ID NO: 18686 - DNA, 564 bp, Zea mays
  Clone ID: 16-LIB84-007-Q1-E1-D7
cattggtcgagattcttacaaggaaaaggcaaagaggactaaatctgtggacacatcttcatcagattctgagtttatgacacgcatgggtgatctttctttggagcgcctgtcagtgtacaaaacagctgttacaactgaggaaaagaagttggattcaatgaacagaaatgagaggcagaaattgctccttgaaaagaagaagttgaacctagagaaattaaggctcgaaaggcagaaactaaaggaggacaaggaagaggagataatgatcttaagcatggatttgagcaaatgtaaccctctactccgccagtactatgaagccaagcaacaagagatactggcaagggttactgggtctacttcatctggccagtgaaggttccttatttaatatgtttgtttgtcatttatgaatgaggcgtactcggacttgttactgtgaacttgctgttctcagaccctaatctggtttgtaccaaaatttttaggtcgtctttgaactatttgtttttaagttaatgttttgaaccatttgtcatggtttgtacctgaaggttt

SEQ ID NO: 18687 - DNA, 486 bp, Zea mays
  Clone ID: 17-LIB84-007-Q1-E1-E1
cgaccgatttatcaaacccgaaacgtttcagctgacggttcttatgttgaggttgtggaacaaggagcgtatagataaggcctccgatgtgctccagtcagtatctacacaagtaaatgaagctttggaaaatattgacttgtcaatgacaaagatgggagccaaagtgaaggttctactgatgaaatggactatgaccacaaacatgcaccaacaaaaatgggtgccaaaggctcccaatcaaattttggcattgacaagtcaatatttatcaaacccgaaacgtttcacctgacggttcttatgttgaagttgtggaacaaggaccgtatagataaggcctcggatgtgctccagtcagtatctacacaagtaaatgaagctttggaaaatcgacctaattccatacagcttagggggtcgacatgcactaaatggtttccagctaaagctcgggtggaatatgttccaatgctggaagttggt

SEQ ID NO: 18688 - DNA, 544 bp, Zea mays
  Clone ID: 18-LIB84-007-Q1-E1-E5
gtttggtgcagtgctgaaagtagtcattgtcactaatgccgcaacgggccagccaacagggtctgcctatgtagagttcttacacaaagaatcagctgaacgagcattgtcgttgaatggcacatcatttatgacccgtattctcaaggttgtccggcgaagttctcatgaaacagctcacttttatggttggcctggtagtggacggtcatcaatatatgggaggcatggtaggatggcatacccaagagctgttatccctggtggttcctttacagggcgtgctccgatgaaagctggtgctagaagtttacagtggaaacgggagccttcaggcactgattcaagtgcacgtgcgaaaactgacatgagtgtggcattttcctctgaacaggtgcttccacgtgcaacataggggagtatgttaccgctgagctgatataatgagaaccaagtggtatcccactcgtcgctcctggccctaatggctgaatatggacagcaagctgagaagattgttccttccggctgcactgttaagaaa

SEQ ID NO: 18689 - DNA, 645 bp, Zea mays
  Clone ID: 19-LIB84-007-Q1-E1-E3
gggagatcctgatcgtgctataaatttctatgagaaggcatttggcatggaacttcttcgcaagcgagacaattctgagtacaagtatacgattgcgatgatgggatatggtccagaagacaaaaatgctgtattggagttgacctacaactatggggtgaaggaatatgataagggaaatgcttatgcacagattgctattagtactgatgatgtctacaaaactgcggaagcaattagagtaaatggtggacaaattactcgtgaacctggcccattacctggcatcaccaccaagataactgcatgcacagatccagatggctggaaaacagtgtttgtcgataacatagattttctgaaggagttggaagaatgagctttgctagagatctcaacttggtacatcaagctccatacggttgcaccccgtgagttccatgcatgacctgcaaaatctttgttaagccaaagcctcaaactgaggattgtagataggtcgtccaatctacggcatcatcgcaattgatagttgatagagcattagattttccttgcagattcatatagatgcgcaaccgtttttgtattatgcattttatggcataagttcaatggaaatgattcatgggtaagaaaatcgtc

SEQ ID NO: 18690 - DNA, 369 bp, Zea mays
  Clone ID: 20-LIB84-007-Q1-E1-E7
aacacgcgtccgcccacgcgtccgcccacgcgtccgaggcaccacacctcttcctcctcttcctcctcctagcacagctagcgcctgctccccttcgtctgtgatcatgtcttgcagcagcggcaagtgcaactgcggctccagctgctcctgcggcagctcatgcaactgcatgtcccctgacgtggagaccgccgccgccagcagcatcaagaccatggtcctcgctgcgccgaccaccaaggccagcgccggcggcttcgaggcggccaccgagggcggcggctgcgactgcaacacctgcaactgcggcaccagctgccgctgctcctgctgcagctgcaactgagccgggccccccgggccggc

SEQ ID NO: 18691 - DNA, 626 bp, Zea mays
  Clone ID: 22-LIB84-007-Q1-E1-F5
tcggcgtccacatgcaccgcctcctctccagcagcaagcgccgccgccgccgccacctcgccgcgcgggggcgggagcagaacccggcgctgacgtacatgtcgtgccggtccatggaccccgctgccgcggtggtgcacccgtacccgcacagccacggccacggccgccggcgcgcgccgtcgaggtcgaggtcgaggtcgaggctcgcggccccgtcgtccctgtcgtgccggtccttggaccccgccgccgccgtgcgcagcaagtaccagtaccgtccccgcgaggtggagttcagctgcaagagcacgccgatgcacacacgccggcgccgcctgcgcctgcatcagggccgcggccacccgtcggagccggagccggagcggcacgtctcgggcgcggcggtgacgatgctgttcgcgctcaaggacgacgtccaggtccaggaggcggcggacggcgatctggggctgggccttggcctggacgccccggcgccgcctcaagtgcggatcacgggctcgcccttcctggcgaaggaagaggacaataaccaggaattgaggagcgcggtgggagaggggcgcccgcgagttcaacaagtggttccacgagcagctgcg

SEQ ID NO: 18692 - DNA, 283 bp, Zea mays
  Clone ID: 23-LIB84-007-Q1-E1-F3
cacgccgtcacatcgcaaaacccagcgccccaaagcgaccccaccgaagcgtcccagcccgaccggaatggcgatgggaccgtgcgcacccgcctccgtctcctccttccccgcccgtccagtgcggaccccttccgctgtccggccgcgcggcgccgcgatccgcgccgctgcggcggcggtggagggtggcaggtggtgggcgccactactggggtggtccgggaaggccgactaccttgaggccccggccccggccccggcggtgccgcaggacgacgac

SEQ ID NO: 18693 - DNA, 384 bp, Zea mays
  Clone ID: 24-LIB84-007-Q1-E1-F7
ctcgcgggtccacccaagcctctacagtcactcgtgctaacgcgtgggcgaacgctgacgtggaggtcctacaggccgagatggagctggtccgtgccatggagaggaacagtgtcaacaacgacggcactgcggacgtggaggctgaggacaaggcgctgctgcggactgcggaggccgatctggatgccgccaagaaggagctggatagcatcaaggccgggagcttccagttcatgacgtccatggacagcgcgcgcaccgagatcatgcgggtctccgaggaagtgaaccggctcaaggcgcatgataagaatgcggactcgcaggttcagcagctgaacgccaagttgctgaacgcgagggcccggctggaggccctca

SEQ ID NO: 18694 - DNA, 139 bp, Zea mays
  Clone ID: 25-LIB84-007-Q1-E1-G1
cgcgcatgcgtccgcatacgcgtcagctcaagccccgaccccgtcgcggatcgtcacgggtgccggcctcggcttccccgtcggttccttgccactcgtctggctctcctcactgcctcaccctctgcaacatcttctt

SEQ ID NO: 18695 - DNA, 593 bp, Zea mays
  Clone ID: 26-LIB84-007-Q1-E1-G5
ccgacatcggcctcagcggcagcgagtacccggcgccctacgccatcgtgtaccggaacatggccatcctcggcgtggacggcttctcgtcgctccccaagaactgcctcaccctctgctacatcttcttcgcggcggccatcgtcgtcaacctggtcagggacctggtgccgaagaaggtcgccaggttcatcccgctcccgatggccatggcgatcccgttctacctcgggtccttcttcgccatcgacatgttcatcggcaccgtgatcctcttcgcgtgggagacgatcaacaaggccaaagccaacgccttcgcgccagcggttgcgtcggggctgatctgcggcgacggcatctggaccctgccgcagtccattcttgcgcttgccaaggtgaagccgcccatctgcatgaagttcttgtccaagtcggtgaatgcccaggtggacggcttcctcggaagttgaactgttgaaatcgttacgtgcatgtatattgtgttgatgcaccacgcgtgctgtaaaacgtaccgggtaatgttgtgtccacacgttctggttttgatgttaaaaaaaaaaaaaaaagggcgg

SEQ ID NO: 18696 - DNA, 494 bp, Zea mays
  Clone ID: 27-LIB84-007-Q1-E1-G3
gaggaacagctaggtgcggaaaggcagctctcagtctcacactctgccaatcccagcctgagttctgctctgctctgcttctagccatggtggcctcgcggatcttgctcccgctgctgctctccctcttcctatgctcgcattgctgtaccggagcggcggcggcgaagcggcagctgctgcaggcgcagtcgcaggtgaagttcgacttctccccgttcctgatcgagtacaagaacgggcgcgtgaagcggctgatgggcaccaacgtggtgtccgcgtcatcggacgcgctgacgggcgtcacctcccgcgacgtgaccatcgacgcttcgacaggcgtcgccgcgcggctctacctcccgagcttccgcgccagcgcccgggtgcccgtgctcgtctacttccacggcggcacgttcgtggtggagtcggcgttcacgcccatctaccacgcctacctcaacactctggccgccaaggctggcgtggtg

SEQ ID NO: 18697 - DNA, 75 bp, Zea mays
  Clone ID: 28-LIB84-007-Q1-E1-G7
atgtacatgtgcatctgctcctcatgtctatgcatatgacaacgttgccataacacctgaatctttcaatagtgc

SEQ ID NO: 18698 - DNA, 474 bp, Zea mays
  Clone ID: 30-LIB84-007-Q1-E1-H5
cagacgcgtgggcggacgcgtgggtcagctcccatatccgctcccctacctctccagcatctcccgtctccgtcgtctcgtctctgctcctcacctcgccgccagccatgggcaagatcaagatcggaatcaacggtttcggaaggatcggcaggctcgtggccagggtcgccctgcagagcgaggatgtctagctcgtcgccgtcaacgaccccttcatcaccacggattacatgacctacatgttcaagtacgacaccgtgcacggccaatggaagcacagcgacatcaccctcaaggactccaagacgcttctcttcggcgagaagccggtcaccgtctttggcatcaggaaacccgatgagattccgtggggtgaggctggtgctgagtatgtcgtggagtccaccggtgtcgtcactgacaaggacaaggctgctgcacatctgaagggtggggccaagaaggttgtta

SEQ ID NO: 18699 - DNA, 290 bp, Zea mays
  Clone ID: 31-LIB84-007-Q1-E1-H3
cccacgcgtccgcggacgcgtgggctcccaataagctccccagctccacgccggacgcagcagcagcagcagtagagatggccgccctcgccgcctcctccacggccgccttcgccgccaagccgcgcctcccacgcgcgcgcctcaccgtggcctgctccgccaccggcggcgacggcaacggcagcagcagcagcagcgtgtcgctcgcatcctccgtgaagacgttctcggccgcgctggctctgtcgtcggtgcttctctcctcggccgccacctcccctcccccc

SEQ ID NO: 18700 - DNA, 550 bp, Zea mays
  Clone ID: 34-LIB84-007-Q1-E1-A6
cacacgcgtccgcccacgcgtccgatcggagtccggcagctaattcaccggggaaagatgaaggtcgacagggagatggagattctgctgaacgagatccccctcctccaccacgtcggcctcctcggcggcagcgaggccggcgcggacgacgacgccgacctctccttcctcatccacgagctcgccgcgatgggcctcgtcgacggcgacgacgagctgccggcgccgggcgctgccaccgggtacggcttccccacgaaaggcgagaaccttgtcgccatgcactcgttctccatggccagccactacgcgcacatgcgctctctgtttgttcccgtcaccttcgacgacgccgccgctgccgacggctgggacatccggtgctccccgccgccttatgtgcctccgccttctcccgccacgcctagggcccggtgcaagagcgtgaggaggaagaacgggtcgggtgatgacgacgagccccaagaagtgcggagccgccccggcggccaagttggcacggcgaagaccctggcccggcctgcgc

SEQ ID NO: 18701 - DNA, 249 bp, Zea mays
  Clone ID: 35-LIB84-007-Q1-E1-A4
gacttcttggtgcccgtaaggatagctcacaagacgataagcacaccaagcgtgacgcctgggatctcttcgtcttcttggtgcccgtaaggatagctcacaatttggcgaactgtgtacagttttgtcattttgtgggcacagatgatgctcccagtaatgtgcacaataaagaaaaaaaaaatcaactcgataaaaaaaaggaaaattgtgaacaatggaaaaatgaaaaatacaaaaaaagaataa

SEQ ID NO: 18702 - DNA, 553 bp, Zea mays
  Clone ID: 36-LIB84-007-Q1-E1-A8
ggaagccctcgcctcggcgcctcgggcgctcttcccgcgcgcgtgcccagtcgcgacgccggccggcccggcccggcgccgcaccgccgctcctcacatctgcagggcctccgcggcggctggggaggagacgccgccgccgccggccgctcccaagaagatcctcaagaagaagcccgtctactcgatgaagaaagggcagattgtgcgcgtggacaaggagaagtacctgaacagcatcaattatctgtcagttggacacccgcccttctacaaggggctggactacatataccaataccgcggcgaggtcttggatatcaggaacttcgaaacatgagaatacgccctgatcgcttgggtggggatcccgacgccaccggcatggctaccagcctatatgctcatcaagtctgacaagctccacttacagaggatatgattgccggtcggccgggcggccgggggccttgcagggcaccgttacgccgccccctgagtcatgcgtcatttcgcatcaggagtcggccaattcaggatgcaccttgttgtt

SEQ ID NO: 18703 - DNA, 409 bp, Zea mays
  Clone ID: 37-LIB84-007-Q1-E1-B2
gtccacccacgcgtccaaactgcaacaagcccgcgtcccctggcctggcccgacgtcgcgtcacggctcatgcgacgtcatcgtgggccggacgcgccgatgcgctggtgcggtccggcgcggtgaaggccgtgcggccgagggacgcagcagacgcgctgggcggctaggggttccacctgctggacatccggccggactgggagcgcacccgcgccagcgtgcagggctccgtgcacgtgccgctgttcgtgggggactacgacatgggccccgtgacactgctgaataagtgggtccacttgggctacatcgggctctggaccggccaggccttcaccaagatgaactagcgcttcgtcgacaacgtctccgccaccgtctacgggatcaaggacgccaagcttcg

SEQ ID NO: 18704 - DNA, 457 bp, Zea mays
  Clone ID: 38-LIB84-007-Q1-E1-B6
atcccttctacgacagcgagacgtacaggagccagggtggcgacaggaccgtgcactggtactacgacaggcaagaggacctggaggcgtctgcgagggaggagctgctgcgggaggagctgctcgaggagattgagcagagggttgggggcctcacggagctggtggaagcgagcaaggaggagcagctcacaaagtgatcacgcgggcgaatgggctactcatcagctctctatctgagcttcgttagcaaataagttcagacttctctttactgccatgctcaagtctgtatatggccaaaacccaaaactattgatcaactgcgctactgcactgcaatatcaggatacgtatagttttcttttcaagggaaacaggaagggagtgcagtgcacccccgcccatactgcatgttattaatacgagaaagttatttacagagaaaggaggagaa

SEQ ID NO: 18705 - DNA, 622 bp, Zea mays
  Clone ID: 39-LIB84-007-Q1-E1-B4
cacacgcgaccgaagcttttggcagtgggaactactgcttctttgattggcactagtgtcacgaatgcagcgctcaaagcaaagagggctgttgataaggaccttgaggacgaagtcatggaaattccagtcgtctcaactagtgttgcctatggtgtatacatgtccatttctagtaacctcaggtatcagcttctggctggtgtgatcgagcagaggatgctggagccgttgctgcataaccagaagctactgctgagtgcaatgtgcttcatcgttcgtacgggcaacacattccttggctctttgctgtgggttgactatgccagatggataggcgtccagaagtctcacgaagaggcctaaagttctaacagcttgcctgcatgttccgctgtcactgcctcactaggcacgttcacaatacaatcgattgcttgcctgcctctatagaatgctgatctactcttcactggaggcccccttatatataggacaaaatcccaattttgtttgggaaaacacaagtagggatataactgtcaaattctcgtaagcaacggcaactgcgttctacccctcaactttttttttttcctttttctacctttcaacatgcaac

SEQ ID NO: 18706 - DNA, 469 bp, Zea mays
  Clone ID: 40-LIB84-007-Q1-E1-B8
cccgggtccacccaaacgtccagatgttatcaccaaaagggaagagctccatgttgtgaaaccaacaacttcagttgatgacgcccttgaaatgctggtgaagcataggatctctggctttcctgttattgatgatgactggaatttggttggcgttgtgtcagactatgatttattggcactggatacaatatcaggagctggaccggctgaagcagacatatttcctgacgtggatatcacttggaagacatttcatgagataccgaagcttttgagcaaaaccaacgggaaggttattgctgatgttatgaccccagcgcctctcgtggtgcgtgaaacaactaaccttgaagatgctgcaaggttacgccttgtgactaagtaacgcaggcttccaatgggtcgataactcaagcaaactggttgggatcatttcagaaggaactttgttcaaaccggccctcta

SEQ ID NO: 18707 - DNA, 469 bp, Zea mays
  Clone ID: 41-LIB84-007-Q1-E1-C2
caagggtgtgaggatgtatatgctcttggtgattgtgcaacgattgctcaaagaaaagttatggaagatgttgcttccatattccgagtagcagacaaggataactctggcactttaaccgtgaagaaaataaaatatgtccttggggacatatatgagagatacccacaagtggaattgtatcttaaatccaaccaaatgaagagcttccactagctacttaaagactcagatggtaactccaaggagttgaaagaactgaacatcgaacagttcaaaaaggcccttgctcaagtggactctcaagtcaagatgctcccagcaacggctcaggttgctgcagaagacggaagttacctaaccgactgcttcaacagaatgaatacctgtgaacaatatcctgagggtcctataaggatcaaaggtgcaaggcgccatcggttcaaacctttcaggtacaggcatctcg

SEQ ID NO: 18708 - DNA, 500 bp, Zea mays
  Clone ID: 42-LIB84-007-Q1-E1-C6
gacagccaagaggaggcccgccgccggcgtcacgtacgtggagggcatgaacgcctacagcggcctcaaggggctcaacaaggtgaccatgctcggggtgcgcaagaccgccgactactccttcgccaaggtcgtggcgtcgctcagccccgcgggcaggaagcggcgcggcggggcgttcggcgcccagatgaacgccgccgccgatatcttcaggatcgccgccaccatgagcggcctcgtgctcgtcggcgtcgccgtcggcttcgtgctgctccgggtggaggccgccgtcgaggaagccgagtaaggcgctcgcgcctgcttcataagccatgatatatatataacgtgatgtatgctttcgattcaatctttggaatgtactgtatcaacgatgacaattgatgaatactgttgaaaacatgttttcagagccgaggtctgacattgatcttcaggcgttcaagaagaaagtatttaaaaaaagggcggtcgct

SEQ ID NO: 18709 - DNA, 542 bp, Zea mays
  Clone ID: 43-LIB84-007-Q1-E1-C4
gcgtacgtagaggacaagtatagccgcgccggcgtggagaagggcaagtacgtcgtcatccacggcatcgcctctgactccgtcgccaacatgaagtccagaggcgacgacgactgccttcttcccctcgggcactgggctcagatagccaaggaaatcagctccggcgacagggggctcaagcctctgttcgtgatccctcatgagaagcacagagatgaaatcgaggaggaggtgggggacgacacaagcatcctgttcatcaccaccccaggccagctcacctgcctcatcaacgactctgccggcgtcgtcgcgaccaataccgctgccgtgcagctcgccaacgcccgcgacaagccatgtgtggcgttgttctcgtcggcagataatgcaaggctgttcctgccatacgtggagggcaagagcagctgcaacgtcatatcttcggcgacggggaacctgatcgacatcgacctcaacgccgtgaagaatgtggtgaaagacttggagcccgctcccagcttctgattggcacagaa

SEQ ID NO: 18710 - DNA, 476 bp, Zea mays
  Clone ID: 44-LIB84-007-Q1-E1-C8
aaagattctggtcttcatcctttagttccttacttttcctacttcattgcagacgaggttacccggagtttgggtgatcttcctgttttacttgctctaatgagagtagtccaaagtcttctccgtaatccacatattcatattgaaccttatttgcaccagctgatgccatcaatgatcacttgcattgttgcaaaaaggctagggcataggctctcagataaccactgggaacttagggacttctctgccaatttggttgccttggtatgtcagaggtttggtcatgtctatcacaaccttcaaaatcggttaactaaaacattgatccatgcatttcttgatcctgccaaatcactgacacaacattatggtgctgtccaaggggatatctgcactggggcccaacgcgattagactccttcttttgcccaaacttgtgacatatatgcaacttctggagccgggaatgcagc

SEQ ID NO: 18711 - DNA, 384 bp, Zea mays
  Clone ID: 45-LIB84-007-Q1-E1-D2
cacacgcgtacgatcctaaaccctcctagtcctctcgatccccatcccctccaatggcggcgactgccacgtccttcgccactctcgccgtcgcgcgctcggcggggcagcggtccctccttgcctccaaagccgccccctcgccgctcctctccctccgcggcgcccgcctcccctcgcagggcgtctccttatctgggggcctcgcagcgtcaccctctcatagccgctcgcgcttcgccacatcagctagcggcgagcccaaggaagcagaccttcagtcgaaaatcacaaacaaggtgtactttgacataagcattgggaaccctgtgggcaagaatgttgggaggatcatcatcggcttgtacagggatgatgttccac

SEQ ID NO: 18712 - DNA, 123 bp, Zea mays
  Clone ID: 46-LIB84-007-Q1-E1-D6
aacacgcgtccgcccacgcgtccgagcaggtatagaggtagccaatgcaaggccatgattgcaacaatggatacatcacatccagcagagaactgctggaaagcaaaggaaccatggccgggg

SEQ ID NO: 18713 - DNA, 587 bp, Zea mays
  Clone ID: 47-LIB84-007-Q1-E1-D4
cacttgcgcacttctacagcccctctgctgcagcaagaaggaaagaagctagcgcttatagcttgtcagccatggccaccgccgccgcgtctagcctcctcaagtcctccttcgcgggctcccggctcccggccgccacgcggaccacaccggcgtccctcgtggtggccaccggcccgcgcggcgccggcgcggggcccatctgcgcgtccatgtccatgtcctcctccaacccgccctacgacctgacgtccttccggttcagccccatcaaggagtccatcgtgtcccgcgagatgacccgtcgctacatgacggacatgatcacctacgccgacaccgacgtcgtcatcgtgggcgccggctccgcggggctgtcctgcgcgtacgagctctccaaggaccccgccgtgagcatcgccatcgtggagcagtccgtgtcgccgggcggcagcacgtggctgggcgggcagcggttctcggccatggtggtgcgcaaaccggggcacctgttcctggacgaactgggcttggcttaccacgaggccgaggactacgtgggcatcaaccaggccgggctcttcacg

SEQ ID NO: 18714 - DNA, 424 bp, Zea mays
  Clone ID: 48-LIB84-007-Q1-E1-D8
caacagcctgacaagttagctacccgcgcagcgccgcgcgccatggtcaccatgatccaccgcattgtgcccctcctgctggtcgcagccacactgctcgcgcatgccgcggcctggccgtacagcccgacgccgaagccgccgccgcctccgccgccgtcgtcgtcatccacgccgtgccctcactcgccctacacgccgtcgccgtccacgccaactggtaagtgcgccgtgaacagtctcaagctgcgcgcgtgcgtggacgcgctcaacagcctcatgcacaccgtcatcgcgagcaaggccatcgacaactgctgcccgcttctctccggcatggccgagctcgacgccgcgctctgcctctgcagcaccatcaaggccaatgcgctcagcgtcaaccgtcggtgctccccgttgacat

SEQ ID NO: 18715 - DNA, 388 bp, Zea mays
  Clone ID: 49-LIB84-007-Q1-E1-E2
gtccacgcatccgtccacacatgcgtccgaagactacaaagccaagggcaaaggcaatgaggaagtatgtccagaagatgatcacgttggcaaaggatggatctcttcacaagaggagacaagctctggcatttagttatgagaagcatatcgtccatgccttgtttgctgaggttgcagacacgtatggagacagacaatgtggctacacaaggatcatcccgacgttctcgatgcggggagataatgcacctatggcgtacattgagcttgtttatgattttccatccgttgctgtggcttcattggtgccatgcaggctgggtggtctcatgtttgcgcattgtcatctggagatttgtttctttcttcccttagcaagttgttc

SEQ ID NO: 18716 - DNA, 402 bp, Zea mays
  Clone ID: 50-LIB84-007-Q1-E1-E6
ctcgtaggtcgacgcaatcctctatactgacgtcctaataactacaaagccaagggcaaaggcaatgaggaagtatgtcgagaagatgatcacgttggcaaaggatggatctcttcacaagaggagacaagctctggcatttatttatgagaagcatatcgtccatgccttgtttgctgaggttgcagacaggtatggagaccgagaatgtggctacacaaggatcatcccgacgttcccgaggcggggagataatgcacctatggcgtacattgagcttgtttaggattttccatcggttgctgtggtttcattggtgccatgcaagctgggtggtctcatgtttgcgcattgtcatctggagatctgtttctttcttcccttatcaagttgttctgtacc

SEQ ID NO: 18717 - DNA, 533 bp, Zea mays
  Clone ID: 51-LIB84-007-Q1-E1-E4
cccgcacgacacgacaccaagtcgaggagctcgagggcaccaatcatggccggcgtgaactccagcgtcgtcgggctcaagcccgccgcggcagtgccgcaggccgccgccgcctcatcgccggcgaagcgggtgcagctggtcgcgcccgagggccgccgcgccgctctgctcggcctggcggccgtcttcgccgtcacggccaccaccgggatcggtcaaggccacgatcttcgatgagtacctcgagaagagcaaggccaacaaggagctgaacgacaagaagaggctggccaccagtggcgccaactttgcgcgcgcctacaccgtggggttcggcagctgccagttcccctacaacttcactgggtgccaggacctcgccaatcaggagaaagtccccttcagcaacgacgacctcgagattgagtgcgaggggaaggagaagttcaagtgcggctccaacgtgttctggaagtgggtgaagcacctagcagcagcgtctgatgggaattggggagattatcacctgt

SEQ ID NO: 18718 - DNA, 470 bp, Zea mays
  Clone ID: 52-LIB84-007-Q1-E1-E8
aacacgcgtccgctcctggacatattcaatccggagggctggctggaaataacgtatcctctgatttcgtttttatcactgtggtctactagctggatgtttggtttctatggactaattttttgtctatcaattttagttccctgaactaacaaatacggaaactctgtattttagtttccatgtgtatttgttaatttaggtatcactaaaacgaggggactagtttggtgtcggcatgtcttcctcaattttgatggattaattaacagatatgttgatgaatcgctacggattggacgatacgacaaagaaaacatattcgtgctggagatatcagacctgccagacgtctgatgacgcgcagttcaagcgcacatgagcgatccgtaattttgtaacgatgagcgaatgtatgttacacgcaaaatacatagcctgcatgtatagcaatatggtatatccgacaa

SEQ ID NO: 18719 - DNA, 480 bp, Zea mays
  Clone ID: 54-LIB84-007-Q1-E1-F6
caccatcgctgatgatgctcttctcagtggaggtcagaaacaacgtgttgctattgccagggcccttctgagggacccatctatcttactgcttgatgaagccactagtgctcttgatgctgagagtgaacattatgtcaagagcgtcatcacaaaagttagtcgagattcagaggctaaaagaactgtggtaatcatagcacacaggctatctacaattcaaacagctgatagaattattgtgttggaaaatggtaatattgtggaggatggtaaacacattgatcttattgagaagggtggtctatattcaggattagccagtcgacaaaatgacgatcttaagtagccctggatcacagaatgtggtttagtgcacgccttctttttaaatggaatggcagaccggagaatcgtctgtcattattggtctctttgcaagaactgacgtggacccaagaagctcgaagtaatctggca

SEQ ID NO: 18720 - DNA, 630 bp, Zea mays
  Clone ID: 55-LIB84-007-Q1-E1-F4
cccacgcgtccgctaaatttcccaaccttccctttccccttcctcctccagtccaccgcatcaccacaccccgtctccaccccgtacaaatccaaaagagggcgaggagggaaacagatcggctggcggcaatcggtagccggcttggctggcacgatgggcggcgaggccgagggcggggagcggcggctggggcgggtgctgagctttgggatcccggacacggcgctggggctagtgatggggtacgtggaggatccctgggaccgcgacgccatctcgctggtgtgccgacactggtgccgcgtcgacgcgctcagccgcaagcacgtcacggtcgccatggcctactccacaacacccgagcgcctgttccggcgcttcccgtgcctcgagtcactcaagctcaaagcgaaaccccgcgcgtccatgttcaacctcatctccgacgactggggcgggtctgcgtcgccttggatccgacagctctcgggcaccttccacttcctcaagaagctccacctgcgcaagaatgaagtatccaacgaagatatcaacatccttgtgcctgccaaggccacatgctcgccgcgctgaaactcgaccgctgctccggcttctccagtccct

SEQ ID NO: 18721 - DNA, 488 bp, Zea mays
  Clone ID: 56-LIB84-007-Q1-E1-F8
aatacttcaactacatggggatgctggcggtggagggcacctacgacaagatggaggcgctgctgaaccaggacatccaccccgtggacatcctcctcatgctggcagcctccgagggcgaccgccccaagatcgaggagctgctccgcgccggcgccaggttcgacgtcaaggacgtcgacggccggacggcgctcgaccgggccactgacgagaccagagagttcatcctcggcttcgccgccaagaaggcctgaacgaccatgtgcaggtcaatcgtgcccggttcttctggacatttggctgcatgtaactaaattcttcgttttctggaatctgtggagtgttcaaccgggggtgaacaagctgtttgcagaggtagctttccgtagtcagctgtattcttacggaagactgatgggtgtactgcgacctgccaaattgctcaactaagggcatgccttgtttgagagctggccaattactga

SEQ ID NO: 18722 - DNA, 445 bp, Zea mays
  Clone ID: 57-LIB84-007-Q1-E1-G2
cccacgcgtccgcccacgcgtccgcccacgcgtccgcggacgcgtgggcgccgcgtcgctggcgggatcgactgccacgtgtggggcaaggccggcttcatcttctactacgaggaggcgcgcacggggcggcccgtgcgctgggacttcgtcgacgtgacggggatccagcagttcgtgatgagcttcgagcccggagctgcgctggaggacgacgcgcagtggcaggcacctgcatactgcttcccggacgacgacgacgccgcaaggagcagtggtgaggaggaagctggggatgggcttgatgcggcgaccagattactcacgaagctagcaggagctgcagcaacgcattgactgtgttgtgttgtagtaataattacgatgcgacatgtaccgtattaatttccagcacaacagatatgcttatgttcctgtagtacta

SEQ ID NO: 18723 - DNA, 436 bp, Zea mays
  Clone ID: 58-LIB84-007-Q1-E1-G6
cattgatgttccgggtgctccttagtaaggttattgcggatgttgtctaccaatggatgttgagtgccacaggcttgaaacgagttatggagaccaagatccagacgcccatgaccacaggaaagaacgagggacatctggtgctggctgaagaaccatcgaccctgatggtactccaggcggcagtaaaagaccgaacgattcagctcatgttcaccaagtttgtgagggagttgagagaggagcccgtcttgatgattagggtgagctggaacgtgttcctcatctcggtctcatctgccgctgtaggcctgcaccgtttcttggtgttcttcttgaaggaggatggtgccagattcttggatgacaaaggcaagaaaatgaggatttggctgatcgatttctccaagcgggcggctaatctgggagattcaag

SEQ ID NO: 18724 - DNA, 343 bp, Zea mays
  Clone ID: 59-LIB84-007-Q1-E1-G4
gcctgcctgtaacggtcctagattcacggatccacccagttgtccttcaggctgtatgcagcccgggatttttgggaacctcaatgagcggcggactttgtggacctgctgatgcatctgtccggcagtatctcggtcgatatctggatgtccacggagcttcagtatctgtacctccaacgaaaccagctggatggtcatgcaccatccaggttcttcgatctccagctgcgtcactgtttcacctcacggacaatcgcatcaccagaagagtcgcacgcgcattcataaagctctataagcactctaatctgtctctggagcacaacagtcttcatgggat

SEQ ID NO: 18725 - DNA, 664 bp, Zea mays
  unsure (1)..(664): unsure at all n locations; Clone ID: 60-LIB84-007-Q1-E1-G8
cccacgcgtccggccgctcgggacgatcgggaacctcacggcgctgcggacgctgtccctccgcctcaacgcgctgtccggcggcatcccggccgacatcgggagctgcacggagctgcggcatctgtacctccaaggcaaccagctggatggacaggtaccggaggggttcttcgacctcgggctgctgcagcggctcgacctctcgaacaaccgcatcgccggcggggtctcgccggaattcaacaggctccagaggctcgctactctgtacctggagaacaacagcctgaatggcacgctgccgtccaaccttgacctcccgaagcttcagcttttcaacgtgtccagaaacaacctcaccggccctgttccaaagtcgctcgcccggatgcccgccagcgcctttgatgggacagggctctgtggtgaccctctagccccgtgcccaacccctccgccgccgccgcagccgcctgttccggccgctgctaatggtagcatcagcgcgaagctctctactggtgcgattgccggcattgctgcnggtgctgccgtggcgttcttggttctgatcgccgttatcttgttcctctgctttcggtgtcagaggacaatgggcgaaaaaatccgccgagacggcgggcgacgcggacctggacgg

SEQ ID NO: 18726 - DNA, 331 bp, Zea mays
  Clone ID: 61-LIB84-007-Q1-E1-H2
tccacacatgcaaacgcgttcccgttcactgccgacaatttggaaatgcaagaagctgtgcctggcagtcgatctccttcaacgtcaaggccggaggcatctccaacaacaccccgacctagttccagaggaccaatctcatgatccaccgcacgtaaacgcagggagagatctagggcgcgctctacgtccgctccgagcgcacgctcaatttctacgagaacgactgcatcgactacgccgccgtgaccgtgctcatcacggggggcaagctcgttacgttcctcctgaacatcaagaagctcatcggcaccctgaagtccaacatttt

SEQ ID NO: 18727 - DNA, 445 bp, Zea mays
  Clone ID: 62-LIB84-007-Q1-E1-H6
gacgctgcgatgctccctgcgcagtcgcttgtcgcccaaaggtccactcgtggcatgcatgcccaacgtgcgacaaatcacatcggattcatcacaccagagatccagtgtagcaggaagctaacaatgcattagaacgaggattccgccactacacgttcaaatggagacatcatcaacgaaaggcacacccatcagcatgaccaccaacacgtcggatcaccatcagtatgccgaacagcttcgataacgctggatatccgcactaagtggtcgatcgcctcccctgatcgcagtgaccgagcatacttcgacagtaggcaaagtgctggcaacccgttgggattcaatggtaaccagatctgagaaatgtcccaagctgtgcaaaactgttgtcccatacagcagaagagcaatttacatacacgcgaatacatggttcccc

SEQ ID NO: 18728 - DNA, 575 bp, Zea mays
  Clone ID: 63-LIB84-007-Q1-E1-H4
ccggtgttcctttcccgcattttccagctgcccatatgaatcacccgatgtacaaggctgcagatataccaggacatcaaccaccaccatctgatgagtatcccgagagacctggccaacctgaatgccagcatttcgttaagagcggtttctgtaaatacaggatgaaatgcagatatcaccatccaaggtcgcgccagtctgcaccaccaccagcaggtcttagccccatcggcttgcctatcaaacctgatcaacctgtgtgcacttactatggacgctatggcttctgcaagtatgggccagcctgcatgttcaaccaccccttcaacttcgggcctcccgtgccggcagcaggaccacccctccctgggcagtaccctacgcatggaaacttcgcctagcaggcacgtgacgagcgattttctgagtcgccacgattgcttgtaataacctcctccacctgtaaagtagcgtagacaaaagctgtacgtggttggcagtagacatccagcatgtaagcgcaacgaagttgcatggagatgggtacgttacagttggtattgcaaacttta

SEQ ID NO: 18729 - DNA, 64 bp, Zea mays
  Clone ID: LIB84-001-Q1-E1-C10
aaaaaaaaaaaaaaaaaaaaaaaaaaaaaaaaaaaaaaaaaaaaaaaaaaaaaaaaaaaaaaaa

SEQ ID NO: 18730 - DNA, 83 bp, Zea mays
  Clone ID: LIB84-001-Q1-E1-C8
catccagcccggcgccgccgccgacctgaccggccagttcgaggtgggcgacaaggtgctggccaccagctccgtcttcgggg

SEQ ID NO: 18731 - DNA, 84 bp, Zea mays
  Clone ID: LIB84-001-Q1-E1-D2
aaaaaaaacaaaaaaaaaaaaaaaaaaaaaaaaaaaaaaaaaaaaaaaaaaaaaaaaaaaaaaaaaaaaaaaaaaaaaaaaaaa

SEQ ID NO: 18732 - DNA, 194 bp, Zea mays
  Clone ID: LIB84-001-Q1-E1-E8
aaagacgcgtgggcggacgcgtgggcggacgcgtgggcggacgcgtgggcggacgcgtgggaagcaaaattctgcgggagaagatgtattttagcatgtttttaaccttggggtcagactctttcgctgtcaaaaaatcaaaaaattacagacgaatcacgaaaaactaaaaaacatatatcgagagctccaaa

SEQ ID NO: 18733 - DNA, 221 bp, Zea mays
  Clone ID: LIB84-001-Q1-E1-G1
gtctcactatggtggagggccgttagattattgtttttgatactacgatgggggagcacatagcccaccagaaatattcattgaagacagacgtttagtccctattttgtttatgggtatttctgtttagacaaatttagtatcaatttaatctataaaatttattatgcaagaacaatctattggaaaggtaaagtttattaaaaaaaaaaagaaggaaa

SEQ ID NO: 18734 - DNA, 181 bp, Zea mays
  Clone ID: LIB84-001-Q1-E1-H1
cgacccacgcctccgaaatgatatagcttattacattttctaccacttttcattcctaacgctgagctttttatgtactatatctcatattattattcatcatataagatatagtacataaaaagctcagcgttaggaatgaataataatatgaccgccttgtgatctaaaaaaaaaggaa

SEQ ID NO: 18735 - DNA, 386 bp, Zea mays
  Clone ID: LIB84-002-Q1-E1-G4
ccatcacattcaagaacaacgccggcttcccgcacaacgtcgtcttcgacgaagacgaggtgccgagcggcgtcgacgccaccaagatctcgcaggaggagtacctcaacgcgccaggcgagacctactccgtcaccctcaccgtgccgggaacctacggcttctactgcgagccgcatcaaggagccggaatggtcggcaagatcaccgtcaactaattaagctagctatcgatcgatatccattcatgtattagctgttgcttcctgctttgtactccgccgatctgtccatctctacatgttttcgtcttcacacaacaacctctgctacgactacgtatatatgcatgctacgagctgattgattttaacgagaaaaacaac

SEQ ID NO: 18736 - DNA, 120 bp, Zea mays
  Clone ID: LIB84-002-Q1-E1-G5
agagatcacgttaaataggagagctaccgctgggacttggtggtttgtaatatatgatccaaccagtgatgaatcaatgcattcacttgtgtacacatatacatttctaccttgcataag

SEQ ID NO: 18737 - DNA, 388 bp, Zea mays
  Clone ID: LIB84-002-Q1-E1-H10
gcgccccgtcgatcggcgacccggatggccgtcgtccgggcgtcgtccgcgcatcagaagcagcacccggccaaggagtgtgcggccgcggcggccgtggcggcggcgctggtgctgccggaggtcgcggaggccgcgcccgggatctcgccgtcgctcaagaacttcctcctcagcatcgtctccggaggcgtcgtgctcgtcgccatcgtcggcgccgtcgtcgctgtctctaacttcgatcccgtcaagcggcgctgagctcaatcaactacacgtgcacacatgcatgcagcgttgtatgttgcattgcatgctgtacgccgcctgtacctatgtactacttcccaatgtaaacagcgtttaatctgtgaaaaaaaacacaaaa

SEQ ID NO: 18738 - DNA, 220 bp, Zea mays
  Clone ID: LIB84-003-Q1-E1-C4
aaagtcacttgggctatcggcaaggagtgtgctgacctttggcctaggatcgccagtgcagcaaatgccatcgtttgagagcttgttggaatgtgtttagacttgagtatgatcatctcaattgtgtgttgcaggtgttgtaagggtgctattggacttgatggctccttttatgtttggtcactcaattctgtagtgaacagaaatttctggttgcctc

SEQ ID NO: 18739 - DNA, 58 bp, Zea mays
  Clone ID: LIB84-003-Q1-E1-C9
aaccacgcgtcaaatatatagaagatggagagtaaaaaaaaaaaagaaaatatataat

SEQ ID NO: 18740 - DNA, 302 bp, Zea mays
  Clone ID: LIB84-003-Q1-E1-D8
acccacgcgtccgcccacgcgtccgggcaaacaagttgaagcaatctcttcccccaggtttgaccgtcgaggaggtctgattggatacatggcaacgccgagttgaactacccaagcttctttatcagtagcagagcatgctactctatgtacttttggaacctaagctattagacctgtcagtgttggatgtctggatcttgcatttttggagaaataccaatttacctcgttcaaggatgcaagtatatttcttgtttaactgcacattactttatatttatgcctgtttcataacagag

SEQ ID NO: 18741 - DNA, 336 bp, Zea mays
  Clone ID: LIB84-003-Q1-E1-G7
actctaaagcgcgcctcacgaagatggggtcgcacatgaagaagaccatcttcgaggagcagacggccaaggcggtcatgaactggcgcaagacggccaaggataaggtgcggcagcgggaggcggcaggcttcctcgacgtgctgacgagcgccgacaccacgccgagccacagccgcgcgacgtcgccgagccggggcaactcgccggtgcacctgctccacaagtacaggggcacgtcggaggagccgcagagcgcgccggcgtcgccggggcgggagctcggggacatgtacccggtggccgaccaacatcgcctgcaacaggctggacccc

SEQ ID NO: 18742 - DNA, 319 bp, Zea mays
  Clone ID: LIB84-003-Q1-E1-H9
tacgtggtcaacaagcacgccgcgctcttcacgtccacggtcatgagcctgctcctggcgcgccccaacgtcaagctgttcaacgccgtggccgtggaggacctcatcgtcaggggagggcgcgtcggcggcgtcgtcaccaactgggcgctcgtgtcgatgaaccacgacacgcagtcctgcatggaccccaacgtcatggaggccaaggtcgtggtcagctcctggcggccacgacgggcccttcggcgccaccggcgtcaacaggctccaggacatcggtatgatcagcgccgtgcccgggatgaaggcgctcgac

SEQ ID NO: 18743 - DNA, 396 bp, Zea mays
  Clone ID: LIB84-004-Q1-E1-A3
gtcagagaatgaacttaactccatggtagctttaatagattcaattcgatcaactgaaaaagctcaaaagacttcaagaagtgacgtttccaaactttccaaagatcttgaggaggcaaatgaattgaatgaagacctgatatcacaaatttctaaactccgacaggaatccaatgaaatgcacgtacatatcactaataaactaggacaggcacaatcactagctaaagctctgtcagaagaattggcttcactacatgaaatagctcagaacggacaacaataactcgaagccacctcgattgagctggcatctattgcagaagctcgtaataacttgaagaaagaactgctggctgcgtagaacaatttgcagtcaaccacacatgagcttgt

SEQ ID NO: 18744 - DNA, 76 bp, Zea mays
  Clone ID: LIB84-004-Q1-E1-A7
accacgcgtccgctaaaaaatactacaaataatccaaaaaagtaaagaaataaaaagataatacatcatgggctgt

SEQ ID NO: 18745 - DNA, 188 bp, Zea mays
  Clone ID: LIB84-004-Q1-E1-B10
atagctctgtacaggtgatggagatcgttgttgcggattcttatcgtcttcctggttacatacttacattattgttatgatctgatcagcggtaggttttgtatacgctgctcattgattcgtctgcctgctattttcgtatatcgatgcacttgttttaccagttgctttcgttcaaaaaaaaaata

SEQ ID NO: 18746 - DNA, 410 bp, Zea mays
  Clone ID: LIB84-004-Q1-E1-B3
cccacgcgtccgcccaagcgtccgcccacgcttcagcggtcgcatgagatcggcctcattcaccatcaccacccgcaccagacactagcatactcgaccactgatacagtgaggggagcactccgcagcgattgcccgttgaagcgcccatggaggcaccacctactgtggctacagcatcccgcacatacaggcgctggcacatcgtcgcctgcaatggcctccgcgccgtgatgtggatctgggttttccacacggctaagcaggatcgggcttagctcttgggtttgcgtcatccctgggatggacatgatgaccactctcatggtcatggacacaggcatgaagcatcatcatcggcatcttcacatttagttccgtactggctgctgacgatactttgcatgttc

SEQ ID NO: 18747 - DNA, 162 bp, Zea mays
  Clone ID: LIB84-004-Q1-E1-B5
tgtttttttttttttgattttttgttttttttacttcttttattctcatattttttttattctgatattattttgtatattttctcatggggaaaaggaggtaagaaaatgacagcagagggaaccgcacggaaaaagcagcatgccagcggaaaccaagtc

SEQ ID NO: 18748 - DNA, 322 bp, Zea mays
  Clone ID: LIB84-004-Q1-E1-B9
atgaagctttccttggagaacatccttatggcataccggagagccaagacacgggcaattctgctggactacgatggcacgctgatgccacaggcgattaacaagagcccgtccactgaatctgtgcggatcctgaacagcttgtgccgagacaaggacaatgtggtgtacctatgcaacgggtatgaccggcgcacccttcatgagtggttcccttgtgagaaccgtggcatagccgctgagcatggctacttcctgaggtgtaagagggacccggaatggaagacctgtgtcgctgccacagactgcagctggaagcaga

SEQ ID NO: 18749 - DNA, 277 bp, Zea mays
  Clone ID: LIB84-004-Q1-E1-D4
cctagagcacacagttctgggcttctggcaaactatttcctgagacgttcatcatttccatcacagaacaataaagctcgggtgccttcagttgatttcgacgtacatttccctgccgatggtgtccagcccactgttgtcacaggcgaacacgctcggttttagacttgtgatgtctactactgttttgacactcgttgtaattctgtatatcgcgtcagactgtgatatataagcagtacactgtgtttcttgcaaacgcctggaaccttttgtt

SEQ ID NO: 18750 - DNA, 151 bp, Zea mays
  Clone ID: LIB84-004-Q1-E1-G9
tacaccctaaagtgagtcgtattaaccgccgccctttttttttttttttgtttattgtgttttttctgggtgaaaatgtttgtaggataactttcggcagactgggcagaaccgggtgggggctcgcgagggtgttgggaagctatctagc

SEQ ID NO: 18751 - DNA, 360 bp, Zea mays
  Clone ID: LIB84-005-Q1-E1-A9
aggacgcgtgggcggacgcgtgggcggctcggcctgggccggctcacgcgcgttcggtgaggaggaccgtcttccagggcagttttgtctattggatgatggggcgcggacaggttagcgacggcgatcgcccgggtggtataacaacagctgctctgcctgccatcagccaaccgctaatctacggggggcttcattagtacgtaaaaggcgcctcacacttggtatacgtaaaagatatactagttattaatacgttaaaggattgagtatacggcacctagatgtttcatttgtacacgattttcattctcttctcgaccatatattaatagtaattaaattaaaaaagcacaaaaa

SEQ ID NO: 18752 - DNA, 389 bp, Zea mays
  Clone ID: LIB84-005-Q1-E1-C2
gcccaaagacaaggccgccgcgctcaccgagggcgacgtgctcgccttctgcagcaagcgcatggcgcgcttcatggttcccaagaaggtggaggtcgtcggagcactaccgaggaacgcgcttggaaaggttgagaaggtcaagctccgggaggcggcacgtaagctggcgcccacagtagcagcggcgcagaagcccaaggcgaagacgacgacggtcggcggtcgccgccacgaccaaccggtggcgcacgtcatggcggtgtcaaagctataggtagcagcagcacacagcgccgctccacggcacagctagctcgtgctacacagtaaacttctttttgccaaaagttttggagcactcaaacatatgacatgccaaagctcct

SEQ ID NO: 18753 - DNA, 185 bp, Zea mays
  Clone ID: LIB84-005-Q1-E1-F5
aactcattccccgcaaaataaacccccgaaaagcaggagaagcgagacccggaagtggaaagctaaggttaaggtcccaactccccgttgcctggggcaacccaattatggccgcccctgccccctccggcgcaactaatgccgccgcctcaacgtctccgctgatggaaccgccgtctccgttc

SEQ ID NO: 18754 - DNA, 287 bp, Zea mays
  Clone ID: LIB84-006-Q1-E1-B12
gaaagaaaatagggtaactaaacaatatatttggcaagtgctatcaagaaacaaatagaaggaaaaatacaagaagcaagttgtttggccctgatcgcaggacctattggtgagctgatgtttccgtgagtaatgtaacgacagaaaaaagaagcaactactacataaactatttatagaagcggcagattcacttcataggttgtagcaactgtctttactaaaagtgtgtttggtttgaggaatgaagtgatccatcttcttctcaagaaaagatggaaagagga

SEQ ID NO: 18755 - DNA, 207 bp, Zea mays
  Clone ID: LIB84-006-Q1-E1-D12
acacaaggcggaagctcagtttggaccaatggctccatcacattgccgtcgcgatatacatgacaggtgtgccatgttgtccctgatccatggcagaccatcagcgatatccgcagcttcaacgcggatgaccactgaatggcacatagcaagcatgcaagctcatctgacctgcgtctctttaccttattggaaagcatcactcac

SEQ ID NO: 18756 - DNA, 79 bp, Zea mays
  Clone ID: LIB84-006-Q1-E1-H4
gggtccatccaaacgtccggattaattgcatgcatgcatatcattagagacaaggaaaaaagatagatcaacacaaaaa

SEQ ID NO: 18757 - DNA, 116 bp, Zea mays
  Clone ID: LIB84-007-Q1-E1-C10
aacacgcgtccggtagcagccagttcgttgtaaattacaaataaatattacaagtaataagaaaaaacacggactttacctgtaaaaaaaacaacaaaaacacaaaaaacaaaacc

SEQ ID NO: 18758 - DNA, 88 bp, Zea mays
  Clone ID: LIB84-007-Q1-E1-G9
aagttcatgtgcatctgctcctcatgtctatgcatatgacaacgttgccataacacctgaatcattcaatagtgcaaaagaagaagac

SEQ ID NO: 18759 - DNA, 324 bp, Zea mays
  Clone ID: LIB84-008-Q1-E1-A10
gctaaaacttctgattaagtgattataacagtctatggttatagttgcatttacaactatacgtctagtaaaaaagataagttttgggctatgtatgactatttcttgtaatcaattatgcactggttcttgcactgttcatgttcagaacacatctggggagggccggctgagcctctcgtcctccagtagctcgtatggattaatgtacggtggcagcgacaccggcgtcttgcttgcatcgtgtacaaaactcggtccaaagtacacgtataaaacagcgaaaaaggagacggtgacaagaatcatgggcccaaacgctag

SEQ ID NO: 18760 - DNA, 94 bp, Zea mays
  Clone ID: LIB84-008-Q1-E1-E1
aaataaatcaaaataaaaaaaaaaaaaaaaaaaaaaaaaaaaaaaaaaaaaaaaaaaaaaaaaaaaaaaaaataaaaaaaaaaaaaaaaaaaaa

SEQ ID NO: 18761 - DNA, 227 bp, Zea mays
  Clone ID: LIB84-008-Q1-E1-F5
gtttttgtttttttttttgttttttttgtttttttggtttttgttttttgttggttttgtttttgttttttttttttttgttttgtgatacttcaagtaaatgattgttagggaaaatctttacagcacatgacgccgagacacattacgtggcttaaaggcgcgcgctggcgcgcgcgagggactagggcaggtgcacacacggccaggccgagcgacgtgatcga

SEQ ID NO: 18762 - DNA, 322 bp, Zea mays
  Clone ID: LIB84-010-Q1-E1-B7
aaaaaccaatgcctgtttcaaataaaatgtcctccaatgctgatgtcgtcagatccagcaagacaggaaaggatcctgaagaagaaaagaatcaaacttccagcagtgatattagtgaaaacatgataaaagaagccagtgaccaaagggcatcttagtttagaaagaaatctgatactcgtaacttacaacgaggtcggcgtactttggaagaagatctcaagcgtcagaacaaagcgttagatgcgtataagaattttagtacgacaggattagacaagagtttgcaagaacctgcaaatgggacaccgaagaacgacaa

SEQ ID NO: 18763 - DNA, 187 bp, Zea mays
  Clone ID: LIB84-012-Q1-E1-C9
acctcatatcatcgtggaccacttaatatatggttacagcagatgcaagcggatgaaccaagatgcacgtagacacacctacgtacatgagcacaacgactgacgccaagcttgcaaagagagatagcatcctggccagttcggtgtctctctctctcacacacactacacaagacttacgcccggc

SEQ ID NO: 18764 - DNA, 353 bp, Zea mays
  Clone ID: LIB84-012-Q1-E1-D11
cgcaggacatcatcaacctcaagccactcatcgacaagaaggcgtggccgtacgtccagaacgacctccgcctccgggcctcctacctgcgctacgacctcaacaccgtcatcgcttccacgcccaaggaggagaagcatagcctcaaggatctcaccggcaagctcttcagcactatccacgatcttgaccatgccgcagagatcaggatcaccccggaggccgaaaaatacgtcggagcagccatagatgcgctcggcgacgtcctcgccaatctaccctagatggaagctaaaagatcggttaacgatggccacctaatttcgggacttgtgtttgttcatatggggccg

SEQ ID NO: 18765 - DNA, 61 bp, Zea mays
  Clone ID: LIB84-012-Q1-E1-E10
aaaaaaaaaaaaaaaaaaaaaaaaaaaaaaaaaaaaaaaaaaaaaaaaaaaaaaaaaaaaa

SEQ ID NO: 18766 - DNA, 395 bp, Zea mays
  Clone ID: LIB84-012-Q1-E1-E11
tcggcttgccccgtcgatttcgccaacccctcgacccgatcgactccattgatcgtacctcgtcgtccggttgtcgatggccaggacatctttcaaaatggagcacgatctcgagaaaaggcagtccgaatctgccaggatcagggataagtatcccgacagaattcctgtgattgttgagaaagctggcaaaactgatgtccccgagattgataagaagaagtaccttgtccctgctgatctcactgtcggccagtttgtctatgtggtgaggaagagaatcaagctgagcccagagaaggccatctttgtcgttgtgaagaacaccttggcaacaactggctctttgatgtctgcaatctaagacgagaacaaggacgaggatggcttccttt

SEQ ID NO: 18767 - DNA, 67 bp, Zea mays
  Clone ID: LIB84-012-Q1-E1-E9
gcagcaccatggcggcggggacgagagcgcctgcggctgtgggctgttgacgatggcccagggcttc

SEQ ID NO: 18768 - DNA, 354 bp, Zea mays
  Clone ID: LIB84-012-Q1-E1-F10
tacaatctcagtagaggctccgtagctggcattcttacacttgatacagtggcagactatcttccgagaaggggacccctgaagcagagaaggacaggtattgcgtatatagcaaacgtcgcggtgcggaaggaggagcgacggaaagggatcgcgaagatgttggtccaagaagcagaggctcgggcaaggagctggggatgccggtcgatggcactgcactgcgacgtaaacaacgtggccgcgctacgcctgtacagaaaccaaggcttcaagtgcatacgagtgccggaaggagctaaatggcccgaacccaagatagctaaaggagcggagtacaccttcatgatgaag

SEQ ID NO: 18769 - DNA, 330 bp, Zea mays
  Clone ID: LIB84-012-Q1-E12-B1
accacacgtctgcaacggccgatgcggtgaaccggcacctggacatactgcggccagcgatcgcgaactactgcgggagcgtggatgtgttggccgtcgatggcgaggactgcctggtgaggtacgacgggccggaatccatcggcagcggtatcaaggcggccatcaaggagaaattcccggacatcaccagtgtggtgtttaccctgtaaaacaccgactggggctatgcatattcggggcagtccacagcagatgaacatgctgatcgaacttcatacttgtaatttgcaaagatttttgtgttgaaaataaaaatgtcccgcaaaa

SEQ ID NO: 18770 - DNA, 368 bp, Zea mays
  Clone ID: LIB84-012-Q1-E12-B7
cgggtttctaggactgattgcatgctcagtaccactgctacattccccaaaatcagctgctcctggcctctaaggtttaagcgcaatgatgttgttgtaagagcaatatcggaagagtgtggcccgcaggggcttcccattgatctcagaggtaaaagggcattcattgctggagttgctgatgataatggctatggatgggcaattgcgaaggcacttgctgcggctggtgctgaaattcttgtgggtacatgggtgccggcacttaacatatttgagacaagtctgaggcgtggaaagtttgctgaatcacggaatctgccagatggatctcttatggatattgtgaaactctagccacgtgatgc

SEQ ID NO: 18771 - DNA, 123 bp, Zea mays
  Clone ID: LIB84-012-Q1-E12-F8
atcatgccatggaggtgccgctctccccagcgcgggcgcactacaggatccactgctgcagctccatgcacgtcatcgtcgggctccgctcgaagtccgccaccgttccgtgcagcggttcgc

SEQ ID NO: 18772 - DNA, 282 bp, Zea mays
  Clone ID: LIB84-013-Q1-E1-A2
aagcctctaaattaactctgagcagttaaacaatgtcattgtcaccatcgatatgttgtttgtttgctcgctggagtgtatgaggaattgaagtttcaagacgggaccagaatgggtgggacgtgtttggtttgcgtttttagacctggtctgtctagccagctatgccaggctgttgcttgcaaaaaaaaataaaaaaaaaaaaaaaaggaacataaaaacaaaagcaacatcaaataaaaggaaaaagcaaatacaaagaacatatcaagcaaaaaacaa

SEQ ID NO: 18773 - DNA, 195 bp, Zea mays
  Clone ID: LIB84-013-Q1-E1-D3
aagacacgtgggttttgctgttatacagcttcgtgtcatttagtttccaaaagctaccgtgcctggactgttagagatgtttacgcaaagtttctttggaagaagatccactcagacacgtgtaattggctcacacggtctcacgaaatgtagttatgttctatggaaatttaccatgttgctaagaaatcaagc

SEQ ID NO: 18774 - DNA, 54 bp, Zea mays
  Clone ID: LIB84-013-Q1-E1-G9
aaaaataaaaaacaaagaaaaaaatcggcagaagaaaaagagggacaaaaacat

SEQ ID NO: 18775 - DNA, 79 bp, Zea mays
  Clone ID: LIB84-013-Q1-E1-H2
attgtattcctcacatgtacaacaattaatgcaacaaattaagtacgtacttgagagagaaaaagatgggaaaaggaaa

SEQ ID NO: 18776 - DNA, 297 bp, Zea mays
  Clone ID: LIB84-013-Q1-E1-H8
gctccagtgagatcctccgatacaacggcgtcagggtcacctactgaagtgaagtggtgaacaacaaaccagtcagagtcagagcaagcaccagccgacaagcaacgcttcgatacaaaattgaagacgatacaaaattttagattactgcgacgtccatcgacgattggtcgatgtttagactgtttattgtgtaccattaccatacttgcccgttaatcgctactattcaatagtaatagtaggcttttgtagggctagcagctgcttgctgctttgcaactttaagcttgtttg

SEQ ID NO: 18777 - DNA, 260 bp, Zea mays
  Clone ID: LIB84-014-Q1-E1-A10
aacatcgttaatcttatcgcttgctactatctagttggcacacgttcttgctgcttgagtttagatctgttacgaaaagtaagcagttgttgactgcttttctaaccggcatttctccaagggacgtgcccctgcacgatccccttgtacggacgtggtttttggccactcctttagtgtccctttcctttgtagaaatatcaaaagcaataaaggatatggtacccctttttcaaaaaggtacctcgaaactaaactgc

SEQ ID NO: 18778 - DNA, 400 bp, Zea mays
  Clone ID: LIB84-014-Q1-E1-A4
aacggatgccagacaaattcagcaaacaagcaaaaggcacgaccaccaccgccggccgggaagcaagctcataccctaatcgccgtccgccggcgacgccagcacgatggcccgctacgaccgcgccatcatcgttttctcccccgacggccacctcttccaggtggggtacgctctcgaggccgtccgcaagggcaacaccgccgtgggcgtccgccgcacggacaccgtcctcctcggcgttcgagaacaagtccacacccaagctccaggactccaagtccgtgcccaagatcccgtgcctagacactcacatacctctggcgtgcgcggggctgaacgctgacgcgcgcgtgctcatcaaacgcgcgcggggtccagtgccagagccaccgactca

SEQ ID NO: 18779 - DNA, 249 bp, Zea mays
  Clone ID: LIB84-014-Q1-E1-D2
aggacacgtgggcttcgttcgtctcgtttgttgttgcccatctgtgtttttgattgcaaagtcgctctgtgtcagttgttagtgctgtgttcatcctcggctccagcagacccatgcatcaaccagcatggactgtggatcgatggatgctgttactcctgtcaggatttgttctaagttaatcctaaggaaaaaatggtgcttcttggtgctgcaaaaaaagagatcatagaaaccagtcagaaccaa

SEQ ID NO: 18780 - DNA, 299 bp, Zea mays
  Clone ID: LIB84-014-Q1-E1-D9
catcgcgtccgcggacgcgtgggcggacccgtggccgacgcgttggccagagcattgggccgtcaacaatggacgaggccgaggatgccatgaagcagctcgaggaggtcggcgccaaggtgtccagcgtttgacactaggtatactgacccctttttttttcctccttttttttttaaatttcgttctttgatctttgccccccaacctttggtgtatccccattgccctttataaggaattgcggtttgccgagaaagaatgacccgctaacgaggcgtcacaagatacgtgtaaac

SEQ ID NO: 18781 - DNA, 420 bp, Zea mays
  Clone ID: LIB84-015-Q1-E1-A5
gaaaatctgatactggaaaggaggaaagcacaaatatgggcatgaacccaaatcttgacagtgatcttgctgctctcttaaattcatggtatgctgctgggttctacacttgcaggtatctcatgctgcaatctacaaagaattccagaccgtagtgtagtaggccatggccgtcttgagatagatgtccgagaagaagcaggttgaagcatcgctgggtgccttcatgtatgtgaatctgctggagttgtgtctgtgctgtgccttgcttgtcactgctatttctagctagactttcggtacgctcgtatgtgaatctgttgatgtcaggcagaaaattgggtaaaattgttgcattaaccgatctggtattcgttgtatatataacgctgacatcagtaacctaaaaaagataagaga

SEQ ID NO: 18782 - DNA, 64 bp, Zea mays
  Clone ID: LIB84-015-Q1-E1-B10
cccacgcgtccgcccacgcgtccgcggacgcgtgggcggacgcgtgtgactagttctagatcgc

SEQ ID NO: 18783 - DNA, 272 bp, Zea mays
  Clone ID: LIB84-015-Q1-E1-D8
ggcgtccatctaccgcaacggcatcaacgacaacgtgcgcatctacaaaggtggcgagaatatggatagggtcacccgcgccgtcgcagcatcgagactcaccacgctgcagcagtggtagatcggtaggtcatgagcaaggaatgcaagcatcggtcgacgtacaaacacaaatagtggctctcgagtagccattgcataggggatatgatcaattcaggcatccaaccatccgctgctgctgtgttagacatgcgggagggggacgtcgc

SEQ ID NO: 18784 - DNA, 332 bp, Zea mays
  Clone ID: LIB84-015-Q1-E1-E6
attgatcttctaaatcttgctgagatggtaaatgatttggatgagagagagaacttgacaatgttgtatgtacagttttgccacagagtggtaatctgcttatagtccaccacatggcatacaaagaaaggatgtttggtccccttttccatggaaggttacaagcaagatacctggtgataggtgttctagctgcaacatgatttgtgaagtttatatacttgtgttgtgccagcaaaatttctctgggtaataggtcaaaacatgtgacgtgcatccaatcataggtaataataccttgttgatgaagccgaggagagcggagatgaact

SEQ ID NO: 18785 - DNA, 214 bp, Zea mays
  Clone ID: LIB84-015-Q1-E1-F4
ccacgcacgcgtccggaaccagtcaagttaccctggtctgctccatgcttcgtctgcaataggagtttttgaggattaagttgaggttttgtaaagaagacttgttcgttactttttttgtggattattaagatatatcctatgtgtagtttatgcttaaaatttaaaaccaatgttgaatacaaaaaaaaaaaaaaaaaaaagaaaaacaaag

SEQ ID NO: 18786 - DNA, 276 bp, Zea mays
  Clone ID: LIB84-016-Q1-E1-A7
tacgtttcttgctcccctttcagggttccgattgctaggctagctgcagctcaggtgcttgtctgaggctgcctcctcattggcaaccggattgcctgctgctggtggatgtggtgatcaacagtattattacagagccatgctatgtgaacattactagtagcagtgctcataaaagctacaatcccatgtcctttttttccccagtcatgtaaaacttccaaactgctccatggttcaaaactctgttcttcaatacatcatcaattatcgatt

SEQ ID NO: 18787 - DNA, 301 bp, Zea mays
  Clone ID: LIB84-016-Q1-E1-E6
ctcgcgggtcgacacaagcctctaaagtcactcgtgcgaacgcgtgggcggacgcgtgggggaagttctgcaatctgactatgttttaaaatttataattgttgtcaattagtgttggtgttggtttcgcccatcaacggatcaaccttattggttatctgaacgacgaattgatatgttaactcgtgaacttcgttatatttaggcagcaaaaaaaaaaaaaaaaaaaaaaagaaaaaaaaaaaaaaaaaaaaaaagaaaaaaaaaaataaaaaaaaaaaaaagaaaagaaaaaagaaaa

SEQ ID NO: 18788 - DNA, 370 bp, Zea mays
  Clone ID: LIB84-017-Q1-E1-E9
gcgacatgacggcaataaaagcagatgacatcttgagcacgctacagagcctggacctaatccagtaccgcaaagggcagcacgtcatctgcgctgacccgaaggtcctcgaccgccacctcaaggcggcggggcggggcggcctggacgtcgacgttagcaagctcatatggactccctacaaggagcaaggctaaaaggcgaactgctccgtgtctcagatttagactcgctgaccgatgcgatgcagtccctgtacatagcatctccccacagctcacttgacttgacttgactcgtgtaccgtgaaactctacttgtaactttgaacatccacatcgttgtctcctcaaaaaaaaggaacgaaaaa

SEQ ID NO: 18789 - DNA, 184 bp, Zea mays
  Clone ID: LIB84-017-Q1-E1-F6
aaggatttgtagatatatgttttaacgtaaaatccaaaacaaatccaataacttcaactcaaagtattaaacattaagcataattgaagttattggatttgttttggattttacgttaaaggatttgtagatatatgttttaaagttatattattctctgtttgatgaaaaaaaaaaaaggaaa

SEQ ID NO: 18790 - DNA, 407 bp, Zea mays
  Clone ID: LIB84-017-Q1-E1-G6
aatgaccccagcgcctctcgtggtgcgtgaaacaactaaccttgaatatgctgcaaggttactccttgtgactaagtaccgcacgcttccagtggtcgatagctcaggcaaactggttgggatcattacacgagggaacgtcgtccaagccgccctcgaaatcaagaaaaaggttgaagggacactctgagatgactacctccaggtatcctttttgctgccacatggggggcttaggacttggacacatctctagttggcaactgatcaatcaaagcgactgtcagagtgatcgatgaaagtcgctatgtttatgaagatttgcccggagaagcacaggtgtatgtgtagtgtttgttatatatgctgatgcaatccttgctggccaaaacacaggttaccgattg

SEQ ID NO: 18791 - DNA, 323 bp, Zea mays
  Clone ID: LIB84-021-Q1-E1-B4
ataagaagcaaacaacaaaggccgtgctcattcagacccttcgtgtgtgtgtttcttgaacgtttatatcacatatgcagcacaaacggtaaatagtagtgcgaggacagtactacagctcatattgcatcgcaacgtggaaatttagttacagacgcgcccagatcgagaggtacagcacgacaaagagaggcaagagagataggggaccggagggcggccggccggggcccaagaccgatgggctcgtgcgcaggaagctgatgaggctcctgtcgctcgtgcccttcggctgccgtgccggacccatcgacgacgcgccg

SEQ ID NO: 18792 - DNA, 197 bp, Zea mays
  Clone ID: LIB84-021-Q1-E1-F10
ctggaataaatcaagattgactggcactgaaagtgtcatcgcgtcactctttcatacttattaaatatcacaagtctgtcctgagatctcagcctggtgcctgcgtgctgcctttgccttgtatatgacgttttactttcttttagtctcaattattcaattttttttttactaaacaaaccaagacaacagaaaaa

SEQ ID NO: 18793 - DNA, 396 bp, Zea mays
  Clone ID: LIB84-021-Q1-E1-G10
aaccacgcgtccgaagctccccaacgaagtgcgagcgacccacgtccacacgacacgaaccaccaccaccaaccagcagccgcaccacgcacccagcgcaaagcgatggcgtcgctcaccatgatggcgtccttcgccgccgtggcggtggccgcgccctcgcgccgcggcaccttcgccgtggtcaggtccgccaaggtcgaccgctgccaggagcccgccacgctagcagcaaccgaggccaggcccgccgccgacggacgccgcgccgtcatgctcgcggctgctgcggcggccgtggcagccatcggcggcgccggcgccgccatggcgggccccaagaacgggacccccgacgcgaagaataagtacgcggccatctgcgtcaccatgccc

SEQ ID NO: 18794 - DNA, 104 bp, Zea mays
  Clone ID: LIB84-022-Q1-E1-A3
gcaaggacgcatgggtttagaacaggttacatcaatacatcgtagtccaagatgattccaggccttctggggccctgggtggcctacacagggtgcagtttgtg

SEQ ID NO: 18795 - DNA, 67 bp, Zea mays
  Clone ID: LIB84-022-Q1-E1-D8
acccacgcgtccgaaaaacaaggaaaaaataaaacaaaaacgaagagaaccaagaaaagacacttac

SEQ ID NO: 18796 - DNA, 346 bp, Zea mays
  Clone ID: LIB84-023-Q1-E1-A6
acccacgcgtccgcagcccccacccatcgagcccctagcgccggcgcctggccgtatggaggctggtggcgaggagttcgcgatcggcgtggtgctctccgccaagaccaccctgggggaggagttcgagggccagatcgtcgccttcgatcgaccctccaacctcctcgttatccaggagggcgtggggagggcggagagcggccagcggcggcacgtgacggtgctgaaggcgaactacatccgggagttctctgtgctcaccaacggagacgaccctctcgatcctgccggttgcatgccggaccttaactccatttatgcccgggaggatgctggcactcag

SEQ ID NO: 18797 - DNA, 184 bp, Zea mays
  Clone ID: LIB84-023-Q1-E1-B6
acccacgcgtccgcggacgcgtcggcgggcgcgtgggttttgccggctgggcagcaggacatgggctcatgcgcaagtcgttccactgcatgagcaatgggcatcacaccattgcggagtcttttcccattacaggatgcacaccatcggtggccttatacttcagcgggggcgtcggacctgt

SEQ ID NO: 18798 - DNA, 375 bp, Zea mays
  Clone ID: LIB84-023-Q1-E1-D8
aaacatggccgcctctccgagccccatcgcccatggcagccgtgccctgctcccagctccctcacctcccccatggccgagcgccctctccagccaccggtgctcgccaagcccatctcccatggcgcccagcccagtttccagcgccctcctccatcaccgcgcacctctggtcgcttcagctcatctccctcgccgtggagctctctgcgtgcgcccctggttcctgcaccctggcctccctcatcttccctgggtccggccatagctggccgccgctgctccatctcgagtcgcgctcgcccagctctgttggctgcgccctccctgccgcagctcgcgcctgtcgtcctgcttactcgagctcgccccggc

SEQ ID NO: 18799 - DNA, 81 bp, Zea mays
  Clone ID: LIB84-023-Q1-E1-F2
aaatacaaaaaaaaaaaaaaaaacaaaaaaaaaaaaaatgaaaaaaaaaaaaaaaaaaaacaaaaaaaaacaaaaaaaaaa

SEQ ID NO: 18800 - DNA, 300 bp, Zea mays
  Clone ID: LIB84-023-Q1-E1-G6
gggaagcagaagcgagacaaatccccagccggctccaaaccctagccacctcccccgtcgatcccttttcatcacccagatctcgctggtgtctgctccgcctcgcttcgatgtgaccctaccctacggtttgagaccgtgttgcggtgtgtgcgtgtgtcgcggcgattcgcgactcgagtacgactcaaggtgtcagaggcggtgcgagcgcaaatgaaagactctgcgcaccgcactacggtggtgctccggcggctgccgccggcgatctcgcaccaagtcgtcgtggtccaggtc

SEQ ID NO: 18801 - DNA, 289 bp, Zea mays
  Clone ID: LIB84-024-Q1-E1-C4
acccacacgtccgcaatacaagatatgttgcttggggacactccactcttgttggaacttttggaaatgtgattgcaacacctgaacatgaggaagcaactataataacgggcggtgactctacaggttcttgacctaattacgcattttcgtcacctgaaacaccttctaaatggtcacttaaatcaattcagtggcctcctttttacaacttctcgacggggaaaacaccaagcttgacaacattataccctttacgctaaatccccctttctccaacatgcgatat

SEQ ID NO: 18802 - DNA, 264 bp, Zea mays
  Clone ID: LIB84-024-Q1-E1-C6
cccacgcgtccgcccacgcgtccggtataatcagccgcttcaattcaagaaagtaatgtggcatgtaggtgacccaatgccccacgaggaatctgtggcatcagcagcggttggttctgcaatcaaagtaaaagctgctgccattgctgtgtgcacattctcacggagagctgcgacgttagtagccaagtagaggtgaacaatgccaactttagcagttatcttcccacgtgaacgatccgatccatcaaagtggcgttctta

SEQ ID NO: 18803 - DNA, 348 bp, Zea mays
  Clone ID: LIB84-024-Q1-E1-G3
actggcactggcagcgaagatccaaagatagcacaatcgcatctcacacgccgagctatttctactttgagagaatccccttctcccacaaggagcgagtaatttgaggcagagaccgacacagatggcagcggttatggtgtctcgccaaggccgggagctgcagcggtacagcgcgagcacgggcgggcgcgtggtggtgggctgcgtcccgtaccgcgtgcgcgggggcgacggcgaggtggaggtcctggtgatcagctcgcagaagaagggccccgcggggggcgtgctgatccccaagggcgggtgggagctggacgagtccatggacgaggcggcccggcg

SEQ ID NO: 18804 - DNA, 374 bp, Zea mays
  Clone ID: LIB84-024-Q1-E1-G5
acggacgcgtgggcggacgcgtgggcggacgcgtggggaatgccaggtggggaaccgattggaaaggccaagctcaaaaatggtttttatttaggcttactggaaatgatgatgagattaaccttaatggtgatggatctgagaagccagagtttggtgaatggacatggatgactccccaggaagttattgaaaaggcagttgatttcaagaaacctgtatatgaggaagcattgaaacactttgccccctacctacagtcagatcccgccgcttcatcatagaagattcgaccaatttgcatacattatcttttttttttagttggaaactaccctgctgtatctggacccccaataatttgacacgacgca

SEQ ID NO: 18805 - DNA, 339 bp, Zea mays
  Clone ID: LIB84-025-Q1-E1-B4
aaagcagaacaagttcagggcgtccatgctgaccttcgactttggccggaccgcgctggacgtcgcgtgatgaacgcacatacgctgccggtcgagcggcattagtagttctctaaatatagacagaggaggtaactttcgagaagaaaaaaaagttatatacagtgtacctgggttttaggtttttgtcaggattcagaaagctgaatctgtaatatcaatcgagctaggtgtaaacagataaggcgagcttgtcacgcgtactccgatcgcctcactgtaatggaaatgaagctaaaagatcatgggtgtcggttcacatgtcagtaacgaaatcga

SEQ ID NO: 18806 - DNA, 69 bp, Zea mays
  Clone ID: LIB84-025-Q1-E1-F11
aaaaaaaaaaaaaaaaaaaaaaaaaaaaaaaaaaaaaaaaaaaaaaaaaaaaaaaaaaaaaaaaaaaaa

SEQ ID NO: 18807 - DNA, 90 bp, Zea mays
  Clone ID: LIB84-026-Q1-E1-C11
agctctcagtttgtatgattatgggagtctaaactgagagatgcatcggtagaattaatgggtacaaactgctagctttaaaaaaaaaga

SEQ ID NO: 18808 - DNA, 243 bp, Zea mays
  Clone ID: LIB84-027-Q1-E1-B11
ccacgagtccgctatgttcaagctagtcaaattggtgggcattccttacatctttgggaagcctactccattctggatccagattattgtggcatggcactcaactgtacagtagattgatcatccattggcaaagtccatcgaaggatgtgctgactgtgatcctccaacgtaaggtgtgtaaaaaggcaagaaaataattgttgggcgtcgagacattcacttgtaaaaaaatagcacatc

SEQ ID NO: 18809 - DNA, 383 bp, Zea mays
  Clone ID: LIB84-027-Q1-E1-E9
gcgcagcctaaaggcggaggccaacggcgagtggctcccgggccttccctcccccgcctacctcgacggcagcctgccgggtgacaatggcttcgacccgttgggcctggcggaggacccggagaacctgaggtggtacgtgcacgcggagctggtgaacgggcggtgggcgatgctgggcgtggccgggatgctgatcccggaggtgctgaccaaggccgggctgatcaacgcgccgcagtggtacgacgccggcaagtcggagtacttcgcgtcgtcgtccacgctgttcgtgatcgaattcatcctgtttcactacgtggagatccggcggtggcacgacatcaagaaccccgggagcgtcaaccagggaccccatcttc

SEQ ID NO: 18810 - DNA, 171 bp, Zea mays
  Clone ID: LIB84-027-Q1-E1-F11
ttatttctcctttgtcgttgcggcttgttcttggcagattggttaagcattgcaactgtaacttctgtgagattgtcttacggttcacatttcatgtatgcctgcctaataagccttcttttcccaaatacaactattaacgttctagcagcctcacaaaaaaatatacta

SEQ ID NO: 18811 - DNA, 435 bp, Zea mays
  Clone ID: LIB84-028-F5-F1A
ttttaatttttttttgaaaccgaggcaaagctataatacagtgcaagtcatatatacaccagtccgtatctaccctagtagaacacttggccgagaacagagaacggaaacggcacggagcccccagccctgctgtacgccaggaccacggcttcaatcccgatcagccgcctcttggccggctgcatctccgacaccttgtcgatcagggccagctcctcctccttggcgagcatggagcgcacacgaatgcccgggtcgtctgcgagcttggcgaggaacgccatcatctgcgtggtcgtcctcccaaggccaagcaccaccccgtctggcctgctgaagccctcaccgacagccctgctcttctatccgccagaagaggccccggtcgtcctaaaaagattggttgtcagcccggccaggcccaagggggtc

SEQ ID NO: 18812 - DNA, 60 bp, Zea mays
  unsure (1)..(60): unsure at all n locations; Clone ID: LIB84-028-F5-F2A
caaaacaaaaaaacagnacaagttatatattcacaataccgtatataccctaattcaaaa

SEQ ID NO: 18813 - DNA, 351 bp, Zea mays
  Clone ID: LIB84-028-Q1-E1-D5
acgaaagcttccatctccgctccaaaaaaccagcagataacacacttgtgctcggggtcgggggagggggccggctagtgcaaatgaagcagcttcagaagatggctctcctacaactcttgttggaaaatattgttctcttattactgccgctgctcgctctgaccttttcttgctgcgacgcggcaaccctgaagctgcacgcccaccacgcggacggcggcctcagcctcagccgccgggagctgctgcaccgcatggccgcgcgcagcaaggcccgcgccgcgcggctgctctcggcctcggggagcgcccgcgtagacccggggacttacgccaacggcgttcccg

SEQ ID NO: 18814 - DNA, 211 bp, Zea mays
  Clone ID: LIB84-028-Q1-E1-E6
acggtcagccacagcagtatacattgcacgcagctagcttggaccagcagcagctgtggtcatggcggcctccatggatcgcctcgtcagctctggcggtggcgcctcatggcctgcggcccctcggccgtcgcgccggcatctcttcgctgtcgtcggctccaggaacaagctcgtaccgacgtgccctatcggattgggggtggcctga

SEQ ID NO: 18815 - DNA, 254 bp, Zea mays
  Clone ID: LIB84-028-Q1-E1-E9
acgcccacgcgtccgaagctagatagataataagcgaggccgagctggctgccatacataggtattgtgtggtgtgtgtgagagagagagaaacagagttcttcagtttgctatctctctctgcatgtttggcgtcagtctttgtgctcatgtacgtacgtgtgtctacctgcatgttggttgatccgattgcatctgctgtaaccatatattaattggtccacgatgatatgatttgatactatatatatact

SEQ ID NO: 18816 - DNA, 322 bp, Zea mays
  Clone ID: LIB84-028-Q1-E1-F5
acgcccacgcgtccgcaacttcgccagcttcgtccggcagctcaacacctacgggttcaggaaggtggacacggaccggtgggagttcgcgcacgagtcgttcctgcggggccaggcgcgcctgctgccgctggtcgtgcgcaagaggaagaaggcgggcgccggcgccggcgccggcggccgggagctgtgcgaggccggggaggaggtgcgcgggaccatccgggccgtgcagcgcctgcgggagcagcagcgcggggtggaggacgagctgcgggccatggaccgccgcctgcgcgccgccgagagccggccggcccag

SEQ ID NO: 18817 - DNA, 358 bp, Zea mays
  Clone ID: LIB84-028-Q1-E1-H8
acgggatattgctctggaggaattggcccccacccatcctattaggctttggctggtgctgaacttctcaactcgcctgaccatgcgtccatgcttgcagtctcgccaaataggtttgatttttgcacccattacatggactgtgtagtgttattttcttctttttttgcaatccttatgatccgaatgtgagctctgtgaaaaatatgaactaaggttattatgcatttcacagttcagacagctgttatgaaataacctggctttagctataacttgtgactagtgcaacatattactattttttacacactagtgtaaacaactaaaggtctgtttggttgggctgtggctgtgg

SEQ ID NO: 18818 - DNA, 219 bp, Zea mays
  Clone ID: LIB84-029-Q1-E1-D7
acggacgcgtgggcggacgcgtgggcgccatgttactcggttttctccattagttatttccgctgcattaaaatttatgattattatttctgaaactccgataatgtaatcactaatgatacttattaaatttgtggtattatgttttattgtaaaaaaaaaaaaaaaaaaaaaaaaaaaaaaaaaaaaaaaaaaaaaaaaaaaaaaaaaaaaaaacaa

SEQ ID NO: 18819 - DNA, 347 bp, Zea mays
  Clone ID: LIB84-029-Q1-E1-F2
agatggaagatcacaataaaggacagtgactgcagcatgctctacatcttgcaagaacagtgactgcagcatgctctacatcttgcaaaactgttcttgacagatggaagatcacaataaaggacaaccaagggaaacttatgagaccaccaaaatttatgaacaactactttggggttggctgtgatgcaaaggttgccttagatatacacaacctgagggaagagaaccctgaacggttttatagccagtttatgaacaaggtgctgtatgcaagagagggagcaaagaacataatggataacacatttgattgttttccttgggatgtcaagcttgagatagat

SEQ ID NO: 18820 - DNA, 379 bp, Zea mays
  Clone ID: LIB84-030-Q1-E1-A9
gcaaatagtgctactgtcattctgtctccatttttgactctgtgcctccgtctccaacgagccagagccgtgccagaattgtgcacgtattctcgttcttattcgagcttctacagcgattttttttctcacttccccgatgcaagcagcatattttgcaaagcagtcagcacatgattcgctccaatccgaccgatcgatcccctacgttacttacaccgctttccatagattgtattacagctgcaagctgtgaagctgcagggcgatgcgtttccgccggatccatcagtacggcatgacatggatggtgcggctgtcgtaggcggcggccatgcccttcttctcatgctccatccgcaccgctcgcagcagctct

SEQ ID NO: 18821 - DNA, 412 bp, Zea mays
  Clone ID: LIB84-030-Q1-E1-B6
acggacgcgtgggcggacgcgtgggggcgttcgtgatatggtccaccagggtctgcaccaggctactaggagagcttgcttccagcggagacgagcacaggggcctcatcgcttatgcgtgctggctcgtctacatgctcttctcattgctcgtcatcttctgataccgtttatggcatggaagactatgttcgcaatttgtttagcggatgatgtggacagtggactgccaccagtcactggagtgttttgctatgttgttgcagaactacatactatctggccactttggggaattgttctgtagtgatcgactagttccagtgggcatggttggtgttcggtgtaaatcttagtagaaataagaggaaatcgaggtccataaacagcaaatgtgcagtcatttggtttt

SEQ ID NO: 18822 - DNA, 196 bp, Zea mays
  Clone ID: LIB84-030-Q1-E1-C4
cgtccaccataatcgaagactacctatatgtgctggcgatttagtcccttctgtcaattctcagatggaaacaaaaagatcttcatttgtgtaaataaatatctcactgcccatccattgggacacggttcggtggctcaaagaagaatagtgtgatagtatagtggactctaaaaaaaaaacacgcactgacaaa

SEQ ID NO: 18823 - DNA, 390 bp, Zea mays
  Clone ID: LIB84-030-Q1-E1-D2
acccaagcgtccgcccacgcgtccgggctccggctgcgcagcggccggccgtgcctggggaagttcgtgtgccgccgcgccaagaacgcgggatacgaggactacaagttcccggaccccatcccggagttcgccgagcaggagacgagcaagttcagggagcacatggcgtggcggctggagcagaagaaagaggactacttcggggaccatgtcgaggagatcgttgacgtctgcaccgagatcatggggacattcctggagaacgattaccgtggaccagggacgctcctggttcacccgttcctggacatgaaaggcgagatcaaggagagggggctccccggcgcacctcaaggggcacgggcggcgatagcatgggccgaaaag

SEQ ID NO: 18824 - DNA, 263 bp, Zea mays
  Clone ID: LIB84-030-Q1-E1-D9
gaaggaaacaccgccgccgccgcgccttccattccagtactcgcggaggaaaggaacaccagccagcgccatggtcgcgtcgacgaccgccgccgcggtgctgtccccgccgtccgtggccgggcttcgcctggcgccgtctccccgggcgcgcgtggcgttccgcgcggcgcgggcgccgcggtccgtggtggcgcgcgcggagctgagcccgtcgctggatgatggacctgagcacgggcatggcgctcttcctgggccgc

SEQ ID NO: 18825 - DNA, 172 bp, Zea mays
  Clone ID: LIB84-030-Q1-E1-G3
tttttttttttgaaggtcgctctgtgtcagttgttagtgctgtgttcatcctcggctccagcagacccatgcatcaaccagcatggactgcggatcgatgggtgctgttacccccgtcaggctttattctaagttaaatcctaaggaaaaaaatggtgcttcttggtgctgc

SEQ ID NO: 18826 - DNA, 499 bp, Zea mays
  unsure (1)..(499): unsure at all n locations; Clone ID: LIB84-028-F5-F1B
gaaaccgaggcaaagctataatacagtgcaagtcatatatacaccagtccgtatctaccctagtagaacacttggccgagaacagagaacggaaacggcacggcgcccccgcccctgctgtgcgccaggtccacggcttcagccccgatccgccgcctcttggccggctgcgcctccgaccccttgtcgatcagggccagctcctcctccttggcgagcatggcgcgcacnacgaggcccgggtcgtcggcgagcttggcgaggaacgccatcatctgggccggccggctctcggcggcgcgcaggcggcggtccatggcccgcagctcgtcctccaccccgcgctgctgctcccgcaggcgctgcacggcccggatggtcccgcgcacctcctccccggcctcgcacagctcccggccgccggcgccggcgccggcgcccggcttcttcctcttgcgcacgaccagcggcagcaggcgcgcctggccccgcaagaacg

SEQ ID NO: 18827 - DNA, 352 bp, Zea mays
  Clone ID: LIB84-028-F5-R1B
gtcaggtaggttgacatggaccgttgggagttcgtgcacgagtcgttcctgcggtgtcaggcgtgccttctgtcgttggtcgtgcgcatgaggttaattgcgttcgccggcgtggcgctttggcctggagctgtgcgaggtcggggaggattgcgcggtgaccatccgggccgtgcagcgcctgtttgagcatcagcgcgtggtggagtacgatcttcggtccatggatcgcctccttcgcgccgccgagatccggccgtcccagatgattgcgttcctctccaagctctccgacgacccgggcctcgtgctgcgcgccaaactctttaaggaggaggagctggccctgatc

SEQ ID NO: 18828 - DNA, 351 bp, Zea mays
  unsure (1)..(351): unsure at all n locations; Clone ID: LIB84-022-Q1-E1-D1.F2
gcgttcgttttgtcttgggtcctcttgggcgggcggccttttttttttttttttttttttttttgtgggggtggggggngtnnntgttggtgccgggggttcnntngcccgggggggnngggtgcgtggcgtgcttgtgggcgtttttttgttggggggttggttttttcggtttttgctgttttttggggggggggggggtggggtggggtgcgtgtgggggtgtgcctggtgcccgtgttttgtggtgggggccgtgggctgggtctgcggggccgttgggggggcgttngtggcgcttgggcgcggggggtggggttgggggttgcggttttggggggggcgtggctc

SEQ ID NO: 18829 - DNA, 594 bp, Zea mays
  unsure (1)..(594): unsure at all n locations; Clone ID: LIB84-022-Q1-E1-D1.R2
gacccatctttcggcccgcgtccggaccaaccccccctcaccanaaaaatcccagttctttggtccgcgtcagagaggcggcggcgatgtctgggcgcggcaagggcggcaagggtctgggcaagggcggcgcgaagcgccaccggaaggtgcttttttacaacatccagggcatcaccaagccggcgatgcggaggctggctaggaggggtggcgtgaagcgcatctcggggctcatctacgaggagacccgcggcgtgctcaagatctttctcgagaacgtcatccgcgacgccgtcacctacaccgagcacgcgcgccgcaagaccgtgaccgccatggacgtcgtctacgcgctcaagcgccagggacgcaccctctacggcttcggaggctaggctaggcgcctcttcatagtcggggactggttaggggacatgtctctgtgtgatgctttctgtggtattattgctgcaatagccgtgtaatccatcgcttctgcaatgaagcgctcggaagcatgctacgtatgttgtgtctgtgggtgattgtatttctggtagtaacagtgattgttcctgaattttggataat

SEQ ID NO: 18830 - DNA, 419 bp, Zea mays
  Clone ID: LIB84-023-Q1-E1-D6.F2
aaaacctgctgccctcttgctgtcttaacggcgcggtttggcggggccgggccccggcgccagtgggtcgggaccggccgtggtcgcgctcccgccgcgtgtgggcgcgtctccgcgccgggcgcgcaacaacgtggcgcgcgcgggcgacggagccgcgggagggcgggggggctacggcgggcgttgcgtgtgccgggtacacttgcgcttgatgtgcgtgtcatattttgatctttgcgtgcgccccggagtgcccggatgagcgaccacctgcccgacgccgccgcatggaaaatgattgatcgggaggagggaaataatggccgcggcggcggcgaactgaactgatgcttactgtgcgacgggcgtgagctgatgatgacttctctcgtcggaagtgccggctgagtcggcgg

SEQ ID NO: 18831 - DNA, 680 bp, Zea mays
  unsure (1)..(680): unsure at all n locations; Clone ID: LIB84-023-Q1-E1-D6.R2
cctccgctttggcggcaaggaagctgccnnnggcttcgcgtgggatggaaactaccnntccgcccggnanncctcaagcgcnnggcaacttcacggnaccgacganccgacgaggtcatncnnatcaagctccacgcccnnctgctcggctaacatatnntaagcacctcagtncnntcagttcgcgcgcgccgcgcgcgcgcggtaccccattanntttccctcnnnctcctcnnnactcaatcannttttccnncatcgtcggcccggcccccgtcgcgccgcccaggtggtnnngctcatcgnncggggcanngctgccggnnggcgcacggaccaacgagatnncaagaactactggnannacacgcacatcaagnncgcaagctnngctgacccgcggnncatcgaccccgcagaaccgnnnaccgcccnngctgagnncgccgccnnngccgcccttcnnaccgccggcncnntcccgtcgccccgcgcccgcccnngcccaccgtnngctgttcgcgccgccccgnngcgccgtcggnagggaccggcgnngccacagcnnagcggcgnngcgggaggcgcnncgaccacgcnngccgcggtnngccccgaccctcaacnnctggacctgtccgtggnngcccgccgtgnctcgccgccccaagacgccggcg
